United States Patent Application Publication US 2023/0390346 A1 - sequence listing, part 10

SEQ ID NO: 14 - DNA, 1000000 bp, Bacillus subtilis
aacaagcatcatcaaatagacttatccgtgttctagacctaaaacgtgcatcatgttgccaagaaaatgttgcatttggctcaaaagtaaaatcgctttttttgccaccaagctgccagacaatctttcctgttgttttatcaaccaaataaatcgcccacatgttacgcatgcttattagaagagtattgttcggcccttcctcaactgaattcacgtgaaaacagtcccaaatattgttagcgcttgtggcggatgacgcaggtaacatcgagtcatccggattaacatgagcaagcacatcccagaagaaaagaagctctcctgtctcaagatctacttcttgaatggaataattgtcaaagtacccatctgccggacctccatacattgtgagatccgctggcacttgtttcacagcagtaaacaaagccgtatcttgctttgtaatcgtaaactcgtgaacatcagaggtaaatccttttttggcggtgagtttcttaatcactttataattctgattgatgatttgataaaaagctccaggttccggatcccccgccgggagattaggatcattagactgagttccagatattgttccttgccacatggtaagaacgggttcccctttgtaggattgtaccctaaagtccgtattttgtgtaaatctactatcaagaggtctaaaccatactgggttaccagcttgatctatgatcaatgcacctgtttgcccaatcatagttgcgccgaacacagtatagggtgcaacgaatattaagccgggtgctgtccctggcttgttgacatttatagaaaccttcataggatgcagggtaggagccgaaacaaagttccattcttgtgagcttgaatgatttgcggatgccttatcaccgcatcccccataaatggcacgcataattccgtatcgggacagaatcccgggttttcatcacataatgatttggcaaaggcaggattttgttggctgaggtttttaaaataacagacaatctcatgattgcgaacaggtaaactgttcagttgaaaagagagcgttaccttcttgtctacatgttgatagagtaatccttgctttgtaaatggaggcggatatgcttgatccggcaaggtgggaataatgtcatggatattgaaaatacgaatactattctttaccgtttggttgaaccgggacgcaaagacagggtcagcgactcgagggctgccataagtatacacaaaaggatttttaaatcgggtattcaccgcaatatcaaaagcggctaacacggctaaagctcctcctaaactatggcctgcgactaataatctttttgctgcataaagcttggttaattccccgatcagctcatttcttgtcgattgataaagacatgtaaatccacgatgggtttttcctgcatttctgacaaacggatatggtacttgatataagtcttggtccgactcattgtccttaaatgttcgggttcctctaaaaattacaatgatctgatcttgtgactcggcaataaaaccaaatacttcagcttccggatcctcaacaccagcaagagctcgtatggtatatcgaaggctatatccttttggcaagacaagcggttccttttcaaagagttgatatgactgatagatcatggccgatagcaatatcgaatcctcacggttaaacatataatataagcttgagtgattcatccgagcagctcctttcttttattcctagcatgttcctcgaaacggagtacacatgtcaggatcgggacaaaaccctggatttttatcgcataatatttcggagaaatcaggattcattttactaaggtatttaaaataacaagcaatcgcatcattgcgcggcgtattattcaattgaagagagattggatactttgtttttacatggtgatagtataatccttcctccgtaaaaggtggtggatacttttttgctgggaaagttggaaacgagtcatgaatatttacaattcgtatactatttttcaccactttgttaaattgggaagcaaagacagggtcaccgatacgcggactgccatacgtatacaagaaaggatgattaaacccagtgttcgcagcaatatctaaagcagctaacgttgccaaagctcctccgtagttgtgcccggtaacaaacagcttttttgacttagaaagtttatttatttgtctgattaaattgtttcttgttgattgataaagacatgtgaatccacgagacgttttcccgccatttttaacatagggatagggaacttgaaatatgtcataggatgctaaaagatccttaggatatgctgcgtatcctctaaacgctataacgatttgatcttgtgactcggcaataaaaccgaatacctcttccataggattctctacgtcagcaaaagcacgaatagtatatcgaagtttaaagccttctggtaaggtaagtttcccttctaaaaagaatggatatgtctgatagctcattgctgcaagaaatattgcggctttgctattaaaaatattgtttttatctaaagaaaccatatatacgcaatccctttcttaatataggtaaatatgatgttaatggtacaatatgaatgaaaacccggaattgctaatgatggtgatatgaacggggatatgggtaaagaaacgtggaagttacttaatgacggaataaaagaaaatgtaaaaagacaaaaagcgccctgttgcaggggcgctttttgattaagatgcatattgaggagatgtatcctcctttactgctttttcttcaggtatatgaatgcatttcgtcatgattgcactcgcaacgtaaaggaccgcaaagatccagacgacgccttgcgcaccgacgagaccgatgaacaaccaagcaagcgcgggaccgacaaacgctgataaacctgcagccaaattcaatacagacatggctgcccctttgtcttttccggccaccgtcggcacaattgccccgatcggcacatagcctgccagcaaacctccccaaataaagccgatcacactgacaaccgctacacttccgccggagaaaaccggtgcataatataataagacagtgaaaatgccgcagccgactccgccgaaccaaataacagtatttttccagccgaatttatcgccgacaataccaaagataagattaaacacaatgttccccagaaaaatcgttccccaaatttgcagccacacattggttgaaattccatgctgggccatgtgcatcggcaaaaagactggaaaaccatatgtaccaatgctgttgatgattctgatgattccgcctgtaaacacgcgcggatttgtaaataaaatcgtaaccccttttaaaagctcctcggctgtttctgatctttttcttttcttcttttcaaaacggtctttattgataaacaatgcaaagaatgcaccgagacatacccagaaaatagagctccaaagcgtattcaaataaccgaacgctttgatcgcgtagcttgagtaccaagcgccgaacacaaacatgccgaggcaatatgctatccaaaaccagccgacagcagtgctcagtttgctttgcggtgttctgtaaatgacccatgtcaagaaagaataagcaaaaagcgggtaacctaacccttttacgaagtaagtcacatacatcactggcaggttcagctgttcaaatccaaatacgataaaagcagctgtaccgatcacataaaacaacagccccataaacatcgttcgttttgcgccaaatgcttcgagacatacacccgaaaaccaggaagctatggcaagcgcaattccgtatatactaaaaatagaagcggactgctgaacggtgagcccgttttcgatcaaaaaaggactgagccagccttgttcaaggccatctcccatcataaacaaaacaacccctaaaaatccccaggcaagccgcttcggtattcctattttatccaacatatctgtctcctccttagatgcttatatccattaccgtattaccttattaaagttgaaaattaaatgattcctcaaaacagcaaaaatgctgccgccttaaatcaatactttgctttctgaacctgaaaaaaagcgctgtgtttgcttccatttctcatataaagccaattctgtctgacagtccttcggttcaatcacccggacatttgctgacatctcctccgttaattgaaaggtttcattgcaaatgactgcagcaccaacgacagatgcctgatgatatccctcttggacatagacctttttttgaagaagatccgcgatatattgagtgagcactttgctttggaatccccctccgcacacccaaacatagtcacgttcaaacggagtaacctctgttaaaatgtcaaagttccatttgattgaaaatgcgatttcttctagcgctgcacgtacaaaatgtgccctctttaaatgtgctgacagcggggcatcaaaaagaaaaccgcctctcgttaatgcattcttttcagccgataaataagagccgagagccgctacacatgcatagtcttcttttgcaagtgcagaaatctcctcctccattacttcgtacgtttcattcggataaaaaatctgttttaatttttgataattcaagccggtaattcccggattcgtttccacaagccaatgcccttgatctgtatgacagttcagccaggctttatgttttgtgtcgccatgatccgcagtaattttggttattggcgttgttgtccctgatacaatgacaatgtcctcaagtccagctccggtgcttttgacagccagctgtgtatccccgccccctgctataaccttagcatttattgaaaggcctaattcggatgcatattcatttgctatcgttccaattgctgttcccgctcttacaagaggcggaaggatagatggagaaaagccgaaaatgtcgcacatctcttctgaccaagtgttttgcttcacatcaaatagcagggtttctgttgcctgtgatggttcatatgttaatattccgctcagttggtacgtcacccaatcactgatgcttgtaaagcttgcagtcttttcccataaagagggctggcgctgttttaatccataaagcttgagcgcagaaaaaagtgcagttggcaggcggcctgtgcggctgtatatctcttcccgatcgggaatgcccgcctcccactctcggccgcgattatcgatgttcggcagcccgagaaaaggattgccgttttgatcaatcaaaacaatcccctgtctttggctcgtcgatgtcaaaccaatgatgtcaatatcacgcgaacgggatagcgcacgttttgccaaattcatcacctgcttccacagcacctgaggagaaaaataacggctgtccgggtaaagcgtctctgtggaatactcgatgtcctcccgttcaactgttagaacactgccagttacactcacgaccgctaccctcgcattgcctgtgccaatatcaaaaacgagatagcctttttgttttttcattctcttagcctcctttcttatacccctgttttcagttcgtccttgttatacattgtcggaatattaagagttttttcacccttccactttttgagggctttattcagtatcgtcacgtgatgatcctccacttcaaatgttgctccagcgagatgcggtgttgccagaacattaggcaatgaaatcaattcataatctgattcctctggaggttcatgataaaaaacgtctaatatcgcacctctgattttatgttcttttaatacagataaaagatcttcacggtttacaacaactgctcttgaagtattgacgaaaatcgcactctgtttcatcagatcaaaatgcttccgatcaataagtccaagtgtttcctcagtacgaggcagatgtacagaaacgatatcactgtctgaaaacaccgttttaagagatactttttcatacagcggatgatcgtcttgaatgtatggatcgtaatactttattttacagtcaaacgcagtcagcagttttgcaatcctttggccaaccgccccgaacccaatcatgccaaccgtttttcctgttaattcatttcctttaaatttgacataagcctgcaggtaatcactgttccactttccatccttcagccattgattcgaggcgctggtatggcgcagaaaggaaatcacatttccaataaacatttcagcaacggcttgtgcattccgccctggtgtataaaaaacaggtatgcctctttttgaggcagctgccacatccacattagagggcattcccctgcaaacaccgacaaatgaaagttcgggaacagaagcaaatacgctgtctgttacctgatcaagttcagtaatcaagcctgtcgcatttgttgcttttagcagctgaatgagttcatcttcccgatatgccctaccttgttccttccaagattgataagtaactgagccaaataagttttcaagctcttttcgtccttcttcgttgtacggtgctgtaaccaaaaccgtcatggtgcaaaacatccttttcattgtatttttcataaaaaaaatctctttccgaagatggaaagagattcatatataggcgcgctctgttacaggcagacgccggtataaaccttgctttcctatctttcaagctgacgcttgctggaattggcacaataatgttgccgaggtttcatagggccagtccctccacctctctggatagaaaatgttgagtatgtaattttcagaataaagaatacgtttatcataaagaagtctcagattgatgtcaatctcttttttcagaattgacgttatgatccgaaatgttataattcttacaaaatatctaactagagagaggaactgggccatgaaatcttttgccacacaacaaaacggcattttcaaatccgtttgctcgctggactgcccggatcagtgcggattgttaatacataaaaaagacgaaaaaatcgtaaaagtgcaaggagaccctgatcatcctgtcacagccggaaacatatgcaacaaagtccggaatatgacggagcgcatctatgatgaaaagcggctgactacaccgctcaaacgaacaggtgctaaaggccaagcgatatttgaaccgatttcctggaaagaggcaatcgatacgatcacctcccgctggaaacagctgattgatgaagagggagctgaaagcatacttccttacagcttttacggaaatatggggaaattgacagctgaaggaatggaccgccgctttttttaccgcatggggtcaagccagcttgaacggacgatttgcagcaaagcgggatctgaaggctataaatatacaatgggcataagcgcgggaatcgatcctgaggaaaccattcatacaaaactatttattttttggggaatcaacgcggtcagcacaaatatgcaccaaattacgatcgcccaaaaagcgcgaaaacaaggtgccaaaattgtcgtgatcgatgtgcataaaaatcaaacaggacgtctcgcagattggtttattccgataaagccgggaaccgacagtgcacttgctcttggcatcatgcacattttatttaaagaaaaccttcatgatgaagcatttctgtctgagtacacggttggctatgaagagctccgtgaacacgtgaaacaatatgatcctaaaaaggtatcgacgatcaccggtgtcagtaccgaagatatttaccgactggcaaaaatgtacggggaaacctccccttcttttatcagaatcggaaacggaccccagcatcacgataacggcgggatgattgtcaggacgattgcctgtcttccggcgatcaccggccaatggctgcacacagggggcggcgcaattaagcataacagcggaattttagaatataatacaaatgccttgcagcggcccgacttattgaaagggcgcaccccgaggtcgtttaatatgaatcagcttggcaaggtgcttttggaaacagacccgccgattcgctctctatttatttacggaacgaaccctgccgtcgtcgcacccgaagcaaacaaagtcagacagggcttgctgcgggaagacttgtttactgtggttcatgatttgtttttaacggaaacggctgcatatgcggacattgtactgcctgcaacatccgcttttgaaaatactgatttttacacctcctactggcaccattacattcagcttcagcagccggtgattgagagatatggggaaagcaagtctaacactgaggtgttccgattactggctgaagccatgggattcacagaccaggagcttaaagattcagatgaagtattaatccgccaggcgcttgaccatccagataatccgcatttggcagagattgattacgatgcactcactaagcattcatttatgaaagcaaaacgcgaaaagccgctgtttccgggcgaacttccaacgccaagcggaaaaatagaattatattcagaaaaaatgaaacaagacggcttcccggctttaccgacatatacacctcttgtaaccgataatgaacatccgtttatgtatgttccggggccaaaccataatttcttaaactcaacattttccaataatgaaaaacacatcaagcttgaaaagacgccaaagctctttatcaacacaaaagatgctgaagaacacggaatcgttgatggggcacctgtacgaatttggaacagccggggagaatgcgagctgaccgctgcagttggagaacaagtgctgccaggtgtcgttgtcagccaaggattatgggcggatgaacaaggaaaaaaacagcttgtaaacgcgctaaccccagacagattgtccgatatgggcggcggcgccacctttttttcaggacgcgtgcagattgaaaaagcataaacgaaaaaaccgcccagaacatgttctggcggtttttttttggttgataatgaaacccggagtatgccaagcccgtataacataacatcgacataatggaggcatgcatatggacgtttttttaggaatcggtattgctttggctggctattttatcggtgaaggcttaaagcagaggaaccaaaccaaaggtaatgaacaaaatgatatcttcctaataaaagaacgggatatttacttttacattggactttttttaggaataacaacgactgaagcaaaacagttagctggagacatggcagacctgccttacatcgaaataaacggaaaaaaatatgtccagaaacatatgttaaaagattggacattcacattagttgaaaaacatcagggtgaataaaacaaatctgaggagagcgagattcattgtcacgacgctctcctctgtttagctgtatggattgaccgccaccaaaactttgttctataagcgctgataaaacgataaaccaccatctatgttctttcctcaaacaactcaagatgcccgttccacaacaatagtttttatattcctttgatgacgtgatgttcttgatgaacgtatgtatcgtaaaacacttagaaaacctattcggtttgaatgtgtgctctcattatgcccccatactgcgcctttatccgcggaggatttttttaaaaaaatatgaaacctaaagcttttagatcctgaatttttattgaacctccatatttctccgattggtaaaaattagcctatacaccggaagctgtacgtttataaaggatcagagaatcccataaccagtaaatcactgcagccgcaatacttaacatataataaaagtacgattgcaatgtccatgctattgacgcaggttcattgataacaaaaaacaggaaagctgcgataaaagcaaccacactgtaaatcaataggtacatgacattgaatgttctcgcttttttctgcaacttcatttggagcggaacagcaaaaaggccatacaccacaaaaccgtataataaagcaattgctgccgtaaacaatgcaattatcatatcgccatacataacgaaagaataaaaccctaataacaaaccaaatgtaaggctggatagccctaatgtcattaaataatatgatgcgatttttttcattttttcaccccccttgtttgatttattcacagtgctgttagtataaattcacaacctttgtattaacaatgcgatgataaaaggtttcaaaaatacgactttttattaaataatacgactggcatgaaaatgcctctcctgattagccaaagcgcgaatgaaaaaaagtgaatgaatacctgatcaacagacaaaataagaagagttgatattcaacacttttcgtaaaggagtgaaaccaatgagtaagaaaggtattcaaaattcaagtattgaacaaataagaaatgaccatgagactgaaacagcttttaaagcagatgatcctaaaaaacacggttccgatcctaaaagaacgaaataagttcttacccccactaaaatatcaataatctggaggaagtaaagtgactcaaaaaaacggtgcagacagacctgatgattataaaagattttcttcattagacaaggaatatgattttcagcaatctatacgcagcaatactgagacagaaagtgtaaacactgaaacacaaactcataacaaagaaaacaaaaatgacacaacagatgttgccgggaaatactttgagccctcagattataaaggaagcacgcaattagaaaaaggattggctgaaactcatgaacaggtgagcgatgactattttgaagggacaatcgatcaaaatttggactagccatacaaacggagctacttaaaagaagtcagttagctccgtttgtagaaacaaccacagtaaaagtagccaacccccaccgaataagatgggggttgcacgtaagtagcctgtttaatagttaaaacgattaatgacggtttgaagttcttccgccaattgggatagagattctgcagcataggagatttcctccattgaatgaagctgctcctgtgaagattttgcaaccgcttctgtatttgctgacgtttcttttgtaccagcagccaatgtatgaactgtgtgctgaatcacttcaacgcctgatgtaagctgttgagttgccgctgcgacttcttgtatttgagaagtgacctgttccacgaggttcagtatttcattgaaatttcctgttgcctcttgagaaagaacaatacctgagctcacattttcttgaacaaccttaatattatttaccgtttctagcgattcattttggatggtcgctaccaccgattggatgtggtttgcagatttatttgtttcatccgccaacttccgaacttcttctgccaccacagcaaatccttttccttgctctccggctctggccgcctcgatcgctgcatttagtgccaacaaatttgtctgctctgaaatcgtcgtgataagcgaagagatatcgctgatttctgctgtgctcgctaccaatgtctgcaatccattgccggctgaatctacagatttatctatgaatttcatctgatctaacatcttgttgacggacttagagcctatttcagccttgtctctcatcgaagaagaaagatccgctatgttccctgtatttgaagcaactgatgatatactgtctaataattcagtgatggattctgcgctcttttctgtcattgagctttgcttcacattgctgtcggcagccatctgcatggctcgggaaatatgttcagatgttgatttcgattcttccgcgcttgccgataattcttcggaggaagcggcgacttgttcagatgagctgctgatctgcttcacaatttgagttaatgaatgagtaaaagaattaaacgattgggcaagctgaccaaattcatctttatttttcacaatgacttttttggttaaatcagcgtcgccatgagcaatttcctctagctgcttatttatgcttcttagtggcaccataatggactttaacagcattatgcttagaacaatgcctaatattactgatatccctgtgacaatgataatgagcgattgactcattttcccattgccctgtatttcatcctttagatcctctacctcttgatccaggcgatcagacagcttattgacagccggatctacgacttcttttcttaatgttctttcttctccaaaatggatggtttctgcttttttaggatttgaagagtaggctgttactacctgctgattcaaagctctatactgagtaaaacttgtcttaatgtcttcaatattggattgatacttctcttcatcaatcaagtcattaacccggtcaaggctctttaagacatcgtctgctttttccttcataccctcgtcgtattctttgtctccggtaatcaagaagcctctttcatcatttgataacccggtcaattcatattggatgtgttttatctctttttggaattccattttgtctttaagttcttcattctttttcacagtagaagaaatcataaatactgaggagcctccaattccaataattgaaacaactaatattgatataatccccagcaattttgttttcactttcatgtgtcgttttccctttccgcacaatgtaatggctgaaataaaatatgttcaagcgcgtttgaatccaattcgcttacgctcatgtccataatatcgacacgtgttatcaagttttatagtgctattttcatatgaataagctaattctttacggctctaaatcttcagaaaggcttcacgaaaaattgactgtcttttgtcgtataagtcactcttattctcattttctattaggcatacaaaaaaggcttttcccacctcaaattggctgaaccggctgttttctcgaaaatataatacaatacgcagcataatatgaaggagcgaaacttaaatggggatcatcaatggtaaagaattcattgaccgattgaataaactagaaaacgaaatatggtatgatggcgaaaaaataaagggtaacatttctgagcatcctgcatttaaaggaataatcaaaacaaaaagctcactttatgaattgcaaacaaaggatgagttaatacatgaaatgacttattgccttcctggagatcataatcgaatcggcctttcctatctccagcctaaaaccaaaaatgatttgaaaaaaagaaggaccatgattgaacattgggctagacatactcatggaatgatggggagaagtccggattacatgaatacggttatgatgagctttgcttcgtcagcggagcttctaaaagataaagagaattgctttcctgaacatatactagatatgtatgaacaagctgctaagcatgacctttcctttacccatacattcattactccgcaagtgaaccggtcacagtcctattttgggctaagtgaaaaaccgatatctgctaaagtcattgatagaaccgaaaaaggtttaatgattcatggcgcacgactgcttgcaacacaaggcgggttgaccgatgaaatcttggttttttcagcgcctaaatttttctttgaaacagatgaagcttatgctttttcaatcccttctaatacaaaaggcgtaaaattcatcacaagagaatcatttgtattaagcgactcttcctttaatcatcccttaagctcaaggtatgaagaaatggattcaattgtggtttttgatcatgtgttagtgccgtggaatcgtgtgtttttttacgataatgtggaagcagctaaagattttatgacaaaaagctcttttcatgcctttacctttcaccaggttgtcattaggcaaatgataaaaattgaatttctattaggtgttgcacagcttcttgtcgacaccattaatgtttccgaatatcagcacatccaagaaaagctctcagaaatcattgtgggattggaaacaatcaaagccctcattgacaaatcggaaaatgatgctcagttagatgaattcggctatatgcgcccctgtttaattcctcttcaagtcatcagtacgatcattcctaagctatatcctcgatttactgaaatcatacaattaattggagctagcggaatggtgacactgcctaccgaaaatgcatttgactcagagatacgggaagatcttgaccaatatcttcaagcaaccaatacaaatgctgaagaacgtgtgaaaattttccgtttggcatgggatttaacaatgagttcattcggaactagacaaactcactacgaaagatattttttcggagatcctattcggatttcaagcaggctgtataccagttatccaaagcaggagcagttgaacatgattaaaacatttttacatgcagatacagaacattgaaaaaacagcgggaaaagatccgctgtttcgtattttttattcaggaaactgaacatggcccggtactgtataggctttggacgttccgctttcaggcagctttggaatggtgtctttcacaacttttccgcggatgtcagtcattctgactttgagagagccagtacctaaattcgtactcacaaaatggttatagtccattttctccatgttgatccacttaccatccttttcatattccattttcataacaggatacttgtgatttctgacttggattgctgcccaccacctgctgctgccttctttgatccggtacgtgaaattgccggtgattggggctttgacaacacgccatttaatattgatttttccgtctttcatattgccgattttacggaaggcattaggtgacagatcaagagctccccgagcgccttcgggataaagatcagtaacatatacggttgttttcccttttggcccttcaacttccaaataagagccggcaagtgccgcttttactcctccgtaattgagatccgccggatttattgcagtaatctccatatcggaaggaatgggatccagcaggaaagctcctcctgaataacctgaccctgtatacgttgcataaccttcatgcaggtcgtcatatgctgccgaagcttgcggggaaaaacagaagatcgtcaacaaaaccataccaacaaatgcactcatgatctttttcatatttggtcctcctcaaaccagactccaaatgagaatcattatcattataagactcaatccatctggtttgaaagaggaaatagattcatagttgattttaaggcaaattcactatcattcatatatcaaatgtaggtacttatgaaaaagccaatacaaatgaacgaatgtgcacttcagccgaatgtcttatttttccctctcaaaattcgcatttcaataacgaaatgaaacaggctgttggcctgataacagctatacaggaaaagctatttttccccgctcagtttcaacttagctgtcatcatgatgccaaagatcagcacaatcggaacccaaataatgaagtgataaaaatcaggctcagccagagcaacaataatagcccctacacaatacaaaataatagccagtgctcttaacacagtatctcttaagaaagtcttcttttgcttcttaaaaaacaaacggccggatatatcctctaaaagagaagccaaagtgccggtcaacacagttgaagaaatacctgcaatccccagtttttttgctgctgtagtttgaatccccatagaaatgctcatgagtataattagaatgtgcacaggaacaaatgcccggtaaaaagaaagacaagcaaagacaaacaaaatgaatgcttcaagtgcgagggcttttgtcacagcagaaggccaaagggtattttccgcctttccgaccatcaatgtagcaatgatcacgccgcatataaatccgattagcgcagtcaaggaattaaaaacagtgacttgaatggatttgccgatagctaaccccaataatacaatgtttccagtcatattagctgtgaacacatgtcccaggcttaaatacccgattacatccacgattccagctgttaaacataaaagtgatagcaaggtgtttcgataagctgctgcagtcaacggtgtatcaatcctttcttctatttcaattgttagtatgtcttttggcgcaatctctattttttaagtaacccaacattaattaggaagatagaacctatcattcctttccattaactgtaataataatccccgcaaggaaatgattaaaattgaaaggaagcatattgtgatgaaacgactttgtttatggttcaccgtctttagcttgtttttggttctcttgcctggaaaagcattaggtgcagtcgattttccgaatacctcaacaaatggccttttaggttttgccggaaatgccaaaaatgaaaaaggcatctctaaaacgggcacaacgggtggaaaaaacgggcagattgtttacattcaaagcgtaaatgatttaaaaacccatctaggaggatccactccgaaaattttagtgcttcaaaatgatctttccgcatctgcgaaaacaacagttaccattggctcaaataaaacactcgtgggctcttacgcgaaaaaaacgctgaaaaatatttatttaacaacttcatcagcttctggaaatgtcatttttcaaaatttaacgtttgaacacagtccgcagattaacggaaataatgatatccagctttatttagattccggtatgaactattggattgatcacgtcacattctcaggtcatagctataatgcaagcggaagcgatttggacaaactcgtgtatatcggaaaatccgcagattatatcacgatcagcaactcaaaatttgcgaatcataaatacggtttgattttaggatacccggatgattctcagcatcaatatgacggctacccccacatgacaatcgccaataattattttgagaacttgtatgttagaggcccaggtctgatgagatacggttactttcatgttaaaaacaattacagcaataattttaaccaggcgattacaattgctacaaaagcaaaaatatattccgaatataattactttgggaaaggcagtgaaaaaggcggcatccttgacgacaagggcactggttatttcaaagacataggcagctatccatcactcaacaagcaaacctctccgctgacttcttggaatcccgggtcaaactatagctatcgtgtccaaacgccggaatatacaaaagaatttgtcacgaaatatgccggatcacaaagtacaactctggtatttggctactgatataaaagaggccctgcgttaaaaacgctgtgcctctttttatacttataggctatttttaagcgatccttgtaactccatcaagatccagcgtcggtcaaaccaaaaagcatatgtttttttccgcaataacttcttaaatggctttcttattataccagtttatcgcaagtaaaaagaaatcattgttctggtcctgtattaaatcaacgttcgtcccacacactattcaaaaacccctaaaaaggatgatggatatgtgcggcaggtttactttgtactctgcatttgatgatattattgaccagtttgacatcgatcaattttttcctaaaggtgaataccagccaagctataatgtcgcaccatcacaaaacatccttgcaatcatcaatgatggatcaaataatcgcttaggcaagcttagatggggacttattccaccttgggcaaaagatgaaaagatcggttataaaatgattaatgctcgagccgaaaccattaccgagaaaccggcctttcgaagaccgcttgtcagcaaacgctgcatcataccagcagacagtttttatgaatggaaacggcttgattccaaaaccaaaatcccaatgcggatcaaattgaaatcatctgctctttttgcgtttgctggcttatatgaaaagtggagcacacatcaaggataccctctttatacctgcaccatcataacaactgagcctaatgagttcatgaaagatatacacgaccgaatgccggttatattggcccatgatcatgaaaaggagtggcttaacccccaaaatacaagccctgattatctgcaaagtttgctgctgccttatgatgctgatgacatggaagcataccaggtttcatcattagtaaattcacctaaaaataattcagctgagcttcttgatgcagaaaatcatatgtagtgattgaaattctctagcaagaacttgtcaatagctttgttccttaggtgccaatccctctagtaattatgaatatttagtacatagatcaattagttttcgatatcagttcgaaataattttattatgtaaacttaaataagcaatgttatccctttcatataaaatagtttacatttttataaagtcgcttcacctttctattttgtcagcaaaaaaactgaaccacattaaacttatgaaacctgccgcacctgtgattgcaaatatgatataagcccatagaggtaaatccatacactttccatcctaagaattaaatgaaatttctttcatcttacatgaaggtcttctttcttttgtttatccagtgtaatacttaataatatgttgatgaatgcagctggaaaatatataaatcccactccaagaatgcctagtatcgtacttaaacttactatgtaattctttgtcatcgtttgactgtcaatcaatattagaagtgaaatcaatccagctaaaacacctataaaccaagcatcgccaacagcataagaatcatccagcatccctaaacatcgccccaatatagagctcccaatggcagtcaaactggataaaaatatgagtgctttcatttcttctcctcctttaaagccaatcaaactggtagaaatcggccattgaattcccattatcgaatggttatcatttccacattaacattttaaagctcattacaatacgattcaagcagaaaaaccctacataacgtatatatagggatttaataaaacacaggccaaaattcagctctatctactttaaaaagatatgaagggcagctgtgtgatctgttacgtctttacgtaccgagatatttcacaacaggcactttcttcttgcgcagagaatcaagcatgactgatccagcattcaagttgctttgtactaattctttaggcgtcaatgccatccactgattgagtgacacatctgcatagcggttacttttgaacatttctaaaaaccataatgtttctgtaccagtgttttgtatatagtgtccggcattagaaggcacgtatccaacgtcgcctgctctataatcaaatgtgcgggcagtcccatttccgataaataccgtcattcgtccctgtcctgttagataatattgccactcatcgctattgggatgccaatgaagctctctcatcgcgccaggctcaatctgaacaagtgcagcggctatcgtttttgaaattgggaagttagaagaatccacaattcgtacactcccccctggcatttgaattgggggttgatttaacagctcgtgtttaaaggtcatggggacttttccatatggtgactgaatgtcttcactggcgactgatcccggcacattcccttggtagatatagacttgctcagacggaagagagttgaaagcattctccgggacaccgaaatttgcagacagaacatcttttggtgtgtgtgcaagccaatctgaaatggttaacgttgaaaactcagaaaagttcccatcatcgaaaacgagcagaaactcgcagtgttccaatccctgtatggaatgcggaattcctgccgggaagtaccaaaggtcgccgggaccaacatcagcaatgaaatttcgtccgtcttggtcaacagcggtgatacgtgcccgtcccaaaagcatataagcccactccgcttgcttatgccaatgaagctcgcggacgcctcccgcagttaagctcatgtttacacctgcaatcgcagtcgaaatcggaagctgtcttacggtgatttctcttgaccagccgccgtgatctaatttcatgggagcgtctgagaatgaaaatctcaagttaggaatcataccctcatctgtaacaggcggaacaaatatattcggattttgaatatcccgtattatatttcgcgggcctgtatcaatagctccagctccatcacttcgaataggctgcggcacgtttctgtcttcatgattgattggttgttgttccaacagcatgcacctcgttttagaaatgaacaagattttatttcagcctatgcagaatcttagattgctgtgcctaggaatccgcaaataaaaaagtgaccaccaatgtgatcacaaatacatcaaataaactattttttataccatggcttcttatgtaatttgattgcttctgtctgttttttctggcctgtcctccactccacttttactaatacatcatgtcctatcacttcatcttcaggcatataatcaaaggtggaaatatggtcctccatgcgtcccccacccggcatttcatcacctgtgtactctgataagtcgtactcatctacgttatcatcttgatacttttcgccatctacatacagagtaattctttcaacaacagtccacttttcttccttcttactcccctgccaatatagatttagaaaataattgggtccaattgaagttttgtctgatttttcaaggttagacatccacagtccgcttttcccgctgccctcatatttcactttgtttcctgacaccattacaaataatgtgatgatgcagatgatcaagaatccagcaatgatcaatagccatttcttaatattgttcttttttctcatgtttttcctcactttcctaactttttagtaggaaaatacgatcaaaatgttaccgaaaagaaaataaaaaagggctaatgatctaacagatgactgtctaaacttttgacttaaattaaagtgctctctaaagacaagattaaaacgtataacagctcttaaatgcattttttgtttcattgagtcaagaaccttaaaatggctttttattattaaaaatcaagctagtgtattaagtaacttttcaaatttatttatactcatgatctcgtgagtcacaaatcttccatcaaaaaaaacgctaaaagttgtccaaatagctggtgacttttgtgcctcttctttcgatgataactgaattgactgaaattgaacccctttcttttcagtcaattcccgcaaatcatttatcatgcccactgcaaacggacactgagctgtatagtatatcgtaatccccttttcattgatagaatcacttttcacctggctcttaaatgcaggagaagctgcaaggccattccaagtcaaagccattaattgaaaataaggggcagcttcatcttgtagagtaaaccccatatgctcaaagaaatgcttatcacttaaatagggcagttttttcttgcctgcgatatggataatgccatccatgccgcacgctttcgcatctgctatacatttgtccaacaatcgtttcgcatgaccgttatttttatatctgccagacacccacagacaattaatgtacataaaattaggcgcattgataggcacccatgcctcattcgcaggtaggtattcaataaagacttttgcccgttcatgtaagcgatagaacaccaatccttcatccattcgagctttgagccatctcttcttttcattaactgcatgctcatattgtttcgtgcctaatgcacagcaaatatgattgtcttcaatattgtcctttgtgatttcaatgtagcacatctcctcttttccccctttaacataattacatggaattcaacttcacactttacatgcctaatagaataaatacccgttccaacttaaatactttttcttttccattttgtcaattaactgtaaaactcttcttttattcagatattatcttgattcctatatcacccatttcaaatccaaagtgtgttcatctttgaggattagatgcactgcttatgctataaatacagtacacgaagttttttatttgaagtaatatttgttacgggacagcaatagtaaataagtgataaaaggggaattaaacttggtggaaaaatgttattcttgtttaatttgcagatacaaaggattatttcaaaatcctttgtataaaggcgattatcaaaaaacgtttgacatttgtccatgttgcggttttgaatttggctacagtgaggatcatgatgtgaggttaggttttattgtaactcctgatcatttaattgaggctgcatttcaattgtatcgcaaacaatggattgagagcgggatggtaattgctcatccggaagatattccagaagaattgaaaaatggcaattgcttaaaatttgaagttttgttgaaacaattgaaaaaactaaatcttgacatagaaaattttgaaattagcggtttttaatgatgaaacaggttgcacttgtttaggtttcactgtcattatcagtaaaatgttaagttgaaatgcgcagtcagtcacaaagtctctattcgtattcaataaagactttgtgatcatcgacaaacatttcactcccatcggataaagtatccaaaaggcctcctctggttcttctctatagtcattaatcacagtcactttgacatttgactcagctatgattggttttccaacaatttttcgttttttcctcaggcaaagtaagagatcgaatcatcaaagccattccatctttactgtctaattaatgccatcttcagtgaatttaaaggtctgttttaaattgcgtccttcttgccccttctgtgtccaaattataacaacctctaattcagaggccttatctgccagcataaaatgattgaacttcagcggtgagccatcatttaaactttcagctaacattttagaatcttcttttggtttgacacaattttcatcgggacatccaaaaagcgaaaaccttgtgattgaattagggtcatttctatacaattgcacatccactgtagctgctttttcccctatatttttgacttccaaggaatatacttgatattctcctttttgaggtctcgtaaattcctttacattttttgcttcacttacttttactgaccactgttctgttttttgtgtaataggcaacaccgtaaaagtcagggcatgcgcttttgattggcaaaacgtaaatccaactgctgtaaaaacaattacagaaaataatacccttttcacttcatttatccctccttcctttcactggccgctccttaaagaattgattttgagcaatctacaagctctcttaaccaaaaccttacctgaggttttgtctttactgctctgcatttatttctttcggtatccgagaaggagctttggggatttttctcaatctgctgttaatcacatcagaagagtatagcgtaataatcatacttctcccatacctttttgcccgaattaagattggttggttatattggttttgaaagcgaaagtcaggacctccccagcttaccgtcgcatcccgtccgggcggtacatatggtacacttctagtatgagaatagcgctgaacgatctgcagtcctgcacgatctactgcattaaatagagttgaggacacctgacaaattcctcctcctacaccttcagacaactctccttttacaataatgggtgcacttttatatcctttgttccgagttctcattcccacaacttggttaaacgaaaacgtctcattagggaaaacaacgtgattgtcgattgcttttgcagaaagagaaatattgtgtgaacggcttttattgcttgagttaaaatacgtcacgtactgaccaagctgctgcgtactgatgtgagctagcagctcgctgtcaactttcggataaatgttcatttccggcacttctatcttggagggaccttgcccataaaaatacgcataaaacttttccataaacgcctgttgatacagtttgtagccaaccctgcccgggacgatgcttccatgatcgttaaggacagcatttatcggctcacggtacactttctgatcaagctgtttgatgaatttactgtatttttcatagtcaaccattggagtgccgggaagaggcattgtaaagtcttcacggttaacagtggcaatcgtccgtccttgctgtgtgaccgttaaactgtcctgcggctcactcggctgagccaataaaaaaagaccagtgatcaaaatttgtatcataagtcggtttacctcccaatcattagtatgaacagccgcttatcctttgatgtatttcttcccatcgtttgtttgaatctttagacgttgataaaaaccttcataaaagagcttagctttatgttcacaccgatccctgagctcactgaggcacacggttcattcagtcggcaagtttgaagtagttcagcatctcccagtgatgagggatgcttttttgtcttgtcaaaaatgaaaagggtctcctataacaacaaaaaatcaatccatttcaatatttttttattgagaaacgataaattttttgttacattcaattagacaacaaataaatgaggtgcttgttatgaatcgaatgtcgacaatttttttaaagatagctttggttcttattggaattccaattcttgctttatgcatttttttagtgcctaaggtagccaactattcagcagaattatttccaaatatcgcttatataaaatatctcgttttcatctatttgtatgtaacggcgatacctttttactttgctctttatcaagcgttcaaacttttaagctatattgacaaaaacaaagctttctcgggtttgtctgtaagagctttgaagaatataaaatattgcgcagtcactatcagtatcttttacgcagcaggcatgcctgtcttttatctgatggccgagatagacgacgccccgggtatcattgtgatcggattggttattatttttgcttcaatggtgattgcggtctttgctgctgttcttcaaaaactgttaaaagaagcgattgatataaaatcagaaaatgacttaacggtctgaggtgatgacatggcgattattatcaacattgatgtgatgcttgctaagaggaaaatgagcgtaacagagctttcagagagagttggcatcaccatggctaatctttcgatattaaaaaacggaaaagcaaaggctattcgattatcaactttagaagcgatttgcaaggctttagaatgtcagcccggggatatattggaataccgaagtgatgaagacacaggattcgtaaagaaaaaatatgaaggatcaacagaaaaataaagtgattggcggtgagcttatggacataaacttatatccatctagctgctatactaagcgtccctttcatacacgaagaacacaactatggaggaggcatacatcatgagagccataaaacaaatcgttcattttggctgggaacaagccctttcatgtttgtttcctgccgttatttttgcctctttggctattacgcaaatcatcccactgcccttcttgccgcggtatgactggctgctcattatctgcgttctcatgcaattgtggatggtgcgttccggtcttgagacacgggatgaattaaaagtgatcacattattccaccttattgggcttgctctggaactttttaaagtccatatgggctcctggtcttatccagaagaaggatactccaaaatatttggagtacctttgtatagcggctttatgtacgcaagtgtagccagttatttgtgccaggcatggagaaggcttaatgttgaactggttaagtggccgcctttttttgcagttgttccgcttgccacagcgatttatttgaattttttcacccaccatttttctatagactttcgatggtggttatctgggcttgtcatcattgtcttttggcaaacatgggttacatacgaggtgaatggagctcgttaccgtatgccgctcgcactttcttttgtactcatcggattttttatatggatagcggaaaatatcgctacgttttttggagcttggaaatatccaaaccaaatcgatacatggagtctcgtacaccttggaaaggtaagttcatggctcttgctagtgattgttagctttcttatagtagcatcattaaaacaagttaaggagcagagtcccacaaaggcagagatggatgaatctttttcttagcatacaaggtcccaaatagagtgaaaagcaacgttcaaatggttgcttttttcttttatgtaactctgccggtgagtattcatcttcttcaaatttcatcgcaccacgataactgattcagattacaactgctttcaacacattgataaactcatgcgccgccggcgttatctcttcaaatgaatgtacgatgacgccaatatcgcgtgtgaccctaggaaagatgtcctttttaatcaattgatgcgggacggatgaaagtgtaaagtttgaaatgatgccgatacccaagttatttttgaccatattaatcaaggtttcggcattttgcacagttaagttttcctttaattcgatgttgtattgcgaaaatgcgtttgacatcgcgatttcatgaccgcctttacaaaaaatgaggtcatcttgatatgtttcaaggtcgacatgcttttcaagttttaattcgtcacgctgcggcgggatgacggccaccatatagtcgttacacaatagctgattttcaaacggttcaaatggagatgctgcgattccgatatcaaccgtccgatcctcaacccatccttttatttggtcagaggttccttcgatcaattctatgcggatcagcgggtagtttgatctgaatgcagcaatcgcctgtggcatgatatttgttgaaactgcaggaaatgaaccgattttcaccttcccgtttaacagcttgttttcccggttggctacttgatatattttgctttcaattcccttcatttgcctcgcaagcagcaatatttcttttccgatgtcagtcagcattaaaccatgatgtttatccctgatcaataatttgagctgcagtgagctctccaggttttttatcgctttgcttaccgccggctgagagatgaacaattcttttgccgcttctgtaatattcaatttctccccgacttttacaaatatgtgaagatggttcatattcataaccatttggttatacccccaataataaaaatgtatttcagttatacataaatgtaacatatgatagaaaccagcacgatatttaaacaagaaaggcggcttcattatggtaaaagttatgctgggaatcatatctgtcacacttatttggggttatacttgggttgcgatgaaagtaggaattcatgacatccccccgcttttattttcgggtttgcgcctgttcatcggagcagttcctttatttctcattctcttcatccaaagaaaaaagctttcaataaaaaaagaacatctcaaaagctatatcatcatgagcctgttgatggggctgggctatatggggattttgacgtatggaatgcagtttgtcgattcagggaaaacctctgttttggtatatacaatgcctatatttgttacggtgatcagccatttttcattaaacgagaaaatgaatgtgtatagaacgatgggactggtctgtggcctcttcggactgttatttatatttggaaaggaaatgctcaatatcgaacaaagcgctttatttggggagctgtgcgtacttgcggcagcgcttagctggggaatcgcgaatgtgttcagcaagctacaattcaagcatatcgatattattcacatgaatgcctggcaccttatgatgggagccgtcatgttattggtgttttcctttatatttgagccggtcccttcagccgagtggacatatcaggcggtgtggtcattgctgtttaatggcttgctttccaccggctttacctttgtcgtatggttttgggtgctcaatcaaatccaagcgtcaaaagcatccatggcattaatgtttgttcccgtattagccctattctttggatggctgcaattgcacgaacagatcaccatcaatattatcctcggcgcactgctgatatgctgcgggatttttatgaatacatttacattttcacgacggaaagtgtgaatgatatacatttcccctgtcatttgggcttcatgtgacaggagacgactattacgagaaagtcttctagaatcctgacgacagcctattaaacaatgaaaaaagctaatgtctgcatgtagacattagcttggctggcgtttaggctggtgagaatccagatacttttttattaccattctggctgatcaaactgaaaaccgtatagaccttttactttaacatctccgcaatctggatcttttgtcaaaatcaaataatgagtcttataaggcatcgtctcaactcgatcagttgcactcaaatcaaaatgatcccctgagaagtttttttcactaacggttatttcatatcctgacaaagtcattcgcatgattcttgcgttaattgtacatccttcagtatcgaaaatggtgaatctgtacccaaagtgagatgtccaatggtttgaatttaggtcatcagacttcataaaccatttttcattttctgtcattgtaaaactcactttctcctcatctttcacgataacagccgaagcttcccctacatggatagtcaaagccaaaagaaatgtaaaagctaacatcaacatctttttcaaaagagttcctcccgatatctttttacttcaatttattggaagggtcttttctgatcaagacagtcttctccaaatgaatctttagcatcatgaaatgagccttaataagaacagttttaacccaaatcaaactctattcgaaataaggcttaccaatctatattctttttaaaagtttctgcatttctttatatagctcctagacacatataaaaaatgctcccataagttcaggagcactacaaaaaactgctaaagtgttttctatcgatttattgtattcattagctcaaagaagtattcaggcttataagtcttattcagcttataccatgaacgcaatgtatctggtgcaaatacttctaattttttcaatacttctaccgcaaattccagaggagcaattcctgatgcagtaaccaaattttcatcagatactgcaggttccttttcatatagtgtttctcctttgtaattagggcagaccattttcatatactctaggtcattgcttgtgtgctttctcgaatttaagtatccttcattcgcgaggcccaaggttgcaccacaaatcgcagcaatagtcgtgccaagctttaaagcgtcgccaacttttttcaagatcggctgatgaatatcttctccccaagtgtttcctccgggtaaaatgataagatcttgactctcaagagtacactcatcaagagaaatatctggttttatgcttaatccgcccaacgtagttatcatttctttattagcccctactgtaactacttttaaagatgctgcatcctgtttaaaatatctccctgagtttagttcagcaattaaatatccatattcccagtctgacattgtgtgaaatacgtagagataaacttttctcgtttgcatccaataacactccaatcacaattgataaagctttctaatagatgactttgctgacagccattgtcagcatatgtattctgatttgcctattcttatataataccatgtaggtgggcaattgcccttgttctcccaacttattaaaaatataagataaattgattctatgtttactagcgcaaaggggtttgttacactaactgtcatgggaaacatttcaaaggtaatataaaatcatttgaatgaggaggcctgatgaagttgaaaaataaagcgtcaataaaattcggaatatgtgttgggcttttatgtttaagcattactggtttcacacctttttacagctcaacacatgccgaagcaaaatccatagaagacacaaacatggcaagctgtataacgaataaaaaatttgttcaacttgagaaaaaatttgatgccaggcttggtgtttatgccattgatacaggttcaaacaagacaatcgcctatcggtcgaatgagcgatttgcttacgcatcaacctataaagttctagccgcagctgctgtcctgaagaaaaactcaattgaaaaacttaatgaagtcatccactacagcaaggacgatcttgttacatattctccaatcacagagaaacacctagatacaggcatgagcctaaatgaaatctcggaagcggctatccgttacagcgataataccgctgggaacatcttgttgcaacagcttggcggccctaaaggttttgaaaagtcactgaaacagattggggatcatgtaacgaaagctaaacgattcgagacggatctaaactctgcgattcctggtgatattcgtgacaccagcaccgcaaaagcactagcaaccgatcttaaagctttcactttagataacacgctcacgactgacaaacgcacgatcttaaccgattggatgcgaggcaatgctactggtgacgaactgattcgggcaggcgctccaataggatgggaagtcggcgataaatctggagccggaagttacgggacacgaaacgacattgctatcgtttggccgcctaacagagctcctattgttttggcaattctgtcaaaccgctttacgaaagatactaattatgataatgctcttatcgctgaggctgcaaaagtcgtccttaacgatctcaaataatatgtttagccttttgccacaaaggaaaagacattacttttttaactcctaccgttcattttttgatgaacggttctttcataagacctctagaatcatatatttaaacaccacaaaattaaacgttattatatttaacggcaagttttcattttatggaacaagtaaagtttgaatctgacaagaattaaggctaagcaccctaaaatccgttttctttccttccaagaatatactccttagtgcaagccattataaagaagtgaacatacaatgcagacaactcccttaagtctcttattctgtgaccaatttgtaatactcatgaatatccggactcacttccaatatttcgtctcgaagacactaacatatcaaaccacttgaattaacataactgaacttgatattggtcactggcagtttcaatgcaatagaacaacatttgttgactcagaggttatctatatgagaattcaacaatttttttataataattcatatttttgtatcgttgcacttggtggatttgactcttttaatgtatggaaccacacttttattttttcacctcttttgagatcatctgtgttatcaatctcacttaatcctacaattactatgttatttttaaacttgttcataagttgtccttcagaaagatcgtaatcttcttttactggagcttttgtatcggtaatgagaattgccctttcattgtctttaagcacgacatagcctactaggctctgcatctttgtttcttctccgtgttgttcatttttgcagcctgcaaggaaaataatgagcactatcaagcttactccgattttaggcaactttctccctcccgtaatgttaaacaatctcactccataactacatatcaataaactgtagtgtaaatctatccagaaacttcttcattttctcatattgaatcttttacaagctgttaatacacagactaaatcgggtaaaaattcgtagaggtgatttctttgaatgatgatcattaagtaactcattactcttcatttattttttcaacaatcatggtattggcggtcgccatctttccacaatacacttcttggtttgtaacagttttcttcttgagttttgcacttatctatacattccaaatacatcaaacaagttcttcaaaagcaatatcttatatttcgtattttttattcattgtttcattgacttacactttagttaatatgtaatagtaatcctccctttgtgggaggattatttgtttaagcttatttctaggctgcttttgggccacctctatctataatgataaaactatctgaaccatttttttcttccgatctttgtcttcgtaaatagcaacattttggcgtgtcattaatgtaataccggccattttaaactctttttgatctttaaaataaacaacagggacattcaccaaacggatctacttctttttgttctttctcaaatgtttgtatgtggttgtcttcgaaccatacccttactcttattccgctaaaatcgagatttttactttttatgatccattattctctttcaaaataacttccaactacaacataatatatgtataaattgtaaatggagttgatgtaattgaagattaggaaaatcttattgagttctgctttatcctttggcatgctcatatccacggttcccgcattggctgctggcacttcgtctgaggttgcagtaaaaagtggtgaatatgattatgacactatataccgcattagtcctcttccaatggacttccagccaacaatagaatacaacggttatacttatacgcttacacgacattattttgattactcaatcgggttttacacggctatttatacaaaagttgtttaaatttataaaggagctttttagctcctttttctcttgttttaagcacaaatacaagtttaaatgctggtaataaaaaattcactttaaagaagcgccgcccgcaaaatgcggcttttgcacactacgccaattttatatagaaaagccagacctcctccaagaggttccagcttttcttaatgtgctatcgatcttcgttagttcaacgggaacttaatcattcggtacaaatgcagcctcccacttctagttagggctgatggcggaatatctgatggctctctacacatcagacattataagatttcaatgtagccttctgtaccatgaacgcgaattcgttgcccatcttttatcagcttggcagcattttcaacgccaacaactgcaggtaagccatattcacgggctataacagctccatgggtcatcagtcccccaacttcggtgactaggccttttatggatacaaacaatggtgtccagcttggatcggtaaaggaggtaactaatatatctccatcttctaaatcagcatcttccatgtttaaaatgacacgcgctcgcccctctatcactccggaggaaacaggtagacctacaatcgctccggctgggagattttctcgtttatactcacctgtaacgatttcaccatcagacgtgataacacgtggtggagatagtttttcatataatgtgtactcggcttttcgtgcgctgatgatttgataatccagtttatgtgtgcgtacgacttcgtgaagttcttcaaaagtgagatagtatatatcttctttttcatgaataacgcccgcttctatgagttgttcggcttctttcagtaaagcctgcttataaacgaagtaccgattaaccatgccgtattttggatattccctaaacccgctgaaattccggatgatatctatcattcgttttgtttctttggctttttgttcaccatccggtaattgcttcaatcgatctaataactcttgttctttcttcaaagcttcctgtcgcccttgctcaaatttccgatggctggcattaggctcactgttattgatattattaagaatcattgggataagtgtagttggtttttcgctccatcgagttcttgtaatatcaatttctccggtacatcgcattccgtatttgctgagataatcatagatcgcgtctcgggttttgcttccgccatcaaacttagccagttcatccaaaaaattatcatcttttacatgttgtaagtaatcaattacctctggataaggacgaatcacatctgcgacgtctaatagcgcaagacccatttctgaagtaatattatggggtacagattgagaaagcgtatctgctgcgtttttttcacctaaccactcgttcattttttcgttaatccataatgaagcattcatagcagttcgaatcacaacagaactttctgagttaaataaaatcttctttaattcctggatatcttccagaataaaacgaaataaatctgatcctgatttcgtttggatgttttgttttaactcttctatcgatgtttgactgctctcaatcaaatcagacacgattgtcggatcgttttcaacttgagccggcatatctgcattgcctctgctgggatttggtgctgttttatcatttggtatcgactttatgaaatctcgtcgccttattatggtcataagtgcgtcttttaagagctgatcgtgctgccccatgccttttaagaaaacttctctgctgtcaggggatgccagatgatgtgtgacatcaacaaatagccttccaccggctttacgcatgggtgcagcagtcgtcaacagaaaaaaagacaatcctagtggttttatgggatccgtcatcatttgttgatgaccaacagaaatatagacgtgattttcttggtcactcgcttcagggatggggaataaagtagtgattggacgactctgtacaatataaaaagtatcgcgggccaaacaccattcgatatcttgcggctggccgaaatgagcttcgatctgtcttccaatgcgttccagctgtaaaatttgttcatcagtcagtgtttgagccttttgctgatcagaatcgatctgatgtgtttctgttccgccttcttttcgtccgtagatagccaattttttagttgctattctcttatcgatgatttgcccatcctgtactttataacaatcggcagataccaatccggaaaccagtgcttcaccaagtccaaaaccggcatctatggataacacctttcggttggaggtaatcggatcagcggtaaataaaatccctgaagcctgaggaaaaaccatcctttgaacgataacggataaataaacttggctgtggccaaatccattttgcatacggtaaataaccgcgcgatccgtaaatagggacgcccagcatttactgatatgctgcaagattgcatcgacgccgataatatttaaataggtgtcttgttgaccggcaaaagaagcatgtggtaaatcttcagcagttgcactagaacgcacggcataggcatgttcctcgccgaactgggagagatagtgagccactgctttcacaacatcggaaggaatgtctacttccataatgatttgccgaatcttccggctgatgttaccaatctgatctcggtcctcaacttttagcatcgccaactgatccaacaacacttgtaacgtttcgttttgttcgatggcttttagatatcctactgttgtgacacaaaatccttctggtacttgtataccttgaatttttgataattcccctaaatgtaacccttttcctccaacgagcgaaaactgtgttttttcaatttcatgtaaaccgagaaccaaagaactcattctacatctccccttcaaaaaaatattgacaagagcttcctagcaggatataataaaattataagatggatatctataaccttttaaccagaaagcgcacgtagtgtgattatatcaccgtgtctgtttttgtgcaatataaaaagaacctgggcaatttcaccaggttctttcttaatttacataactagtcacattaaaaaacttggttcgatctgatacaatcctctaagggtatcctaaagttgggttcttttcgaactagtctgtcttgttccgtagagtccccatttatgaattagactttttgttcttaacagtcccaccgttaactagtataaagttatgaggatctggttaactactgagatatttttattttgagtaaggcttatgtttgataaagaagggttatgtaaaggtgtctgttgtgagcaagcgctgactacaaaaaattgatagcattctcatttaaataccattctattaacctatagaaaaagttataaaaccagatggagaatatcctacctccagtaattccaaggccgttcacctagtagaaaacaacctttaaccattactaacgattttaataatcattgattataaaacttctcaaggaacgatcatcagcccgttagctacccctgattaaagatgatctgctaccacactgttacgttagaacttccactactttgatatccttctgtcgccatgacttggtaagcccaattactgcccagattcattccatggctcttccatgcgttcacatgattgctgaaagtgattgtagcgttgcttccggttggtctcttcgtctgacgaacactccagtactgcgtaaaagtagtgcgatcgccatcaatggaaggtgcgttataacgtgtagttgtatatatgtcatatgtacccccatcactttttacagtacctttatacgttccggtaggcctataagtaccccatgaatccaccacataatattctatgaggggcgatctcgtccaaccatataaagttaaatatccattgccattcggtgcccaaactccggcattatagtttatcgtcctaaatggcgaacctgtagtccaacctttaccaacaacaaaatttccggtattagaccaattaacactgtaattcccgccagacccattgacagcgtttactataccgcccccatcagtccaattttgccagtagtctgtgctagctgcagaggcggttgccgaaaacaagctaatactcattaaagctgccgataatccaactaagaaattctttttaaacttaaacatatgttacctcctataatattttttccgactttgaggtagcactcgtatacatttaaaacattcttaattactaacgccaatgcttttgatcgtccccttcagtataataacacgaattcacgagtgaatattaaaagtatttgtaatttaattacaaatacctagaaacacattataagtggtcttcttccaccatatcctgatccttttttcgtaggatcacaattcttgtttctaattcagatggagtaatatctgcaatgaattcccattgaaccatttcaaataaaggagatacacattagagattgtgaaattattgtagctgccgcttgtctaatgaagggaagcaaatttatgaagaatatgaagaactgaagaagaaaacaattaaggttatactaagaaagaactgctcaattagaattattgaccaaaaatttgaggatgatagcttagatcagttttacaaagaagttgcaagatttttatttgaaaggactctgaaaaagaaaaaaagaattgacaatcagggtaactgtgggatgtaaccgagcctccaattcaaaataaaaatctttaaaattcttattttatttaaagagggactgtatatccctctttaaaattaagctttagattgctgctgaaagtaataaaaattgtacttttgatcaaacccttcttcgctaccacaaagaaaaataatgaattcaataaatgcgataatagaggggataccagtccagcaaaacaaaatatatagaataccttgtcctactcttcccaaataaaacttatgtattcccagacccccgaagaaaaatgctaataatgccgctacaattttgttcttcttgcttaccatgacttcctcctagctcattgctgccatttttaaaataatgctttcacattataatgcattttccaccagaaatcgcgaaaatttagaaattcttttgagatttttttatttaattgagaaatgaaagctcatataattgaactagatggttttgggaggtgtttattcaaaatgtatggcaaaagattacgtcaattacgaaaggcacacaaattaacaatggaacagttaggcgagaaaattggaattgcaaaatcaagttacggcgggtatgaagctgaaagcaaaaaaccaccattggacaagttgattattttagctaaactatacgatgtttcagttgattacatacttgggttaacagatgatcctgatcctaaaatggaaagaaaaaacctaaaagagtttttagaaaaaccagatattcactgggatggatataaacttacccctgagatgttagatcctatacggaaaattttgaagttggttactgcaaacaacaattaaaaagagcccttatgtgggcatttgcataaaacaattattttatctaaatctaaaaatttggattccaagcaaattcaatgttaccttctgttcttacgactaaatctttgcttaatctctctttgttaaccttatattctttgcagcttaaatattgagcttgtgcaatgaagttatcattacttgacattatgtatcttttgcgatcacttttccttccatactctttaaaaatatccataaatataacatctgctggcatcttaccatactttttatcatgcgttatctctggaaagttttctaaatgtctaaccttgtctatgattcgtacaatttccttcttcacatgacttctacgctttgaattcttcatgtagatctcaattttaaaacgttttaaattgtttgtacttgtgtctctgatatttttaacgatatactcttcttccttaatatcgtgataatgacaatgcaaagtataaattccgctaactgtatcatcatcttgaaaattcgcaccaaaaagactattcctacttattttatcaactaagtattgggcatctataccgttttgaatatatgcaataatatcagctgtatcagttaataagaaagaattaatttgtttgtcgttattaaatgtaaggaaaagcctatcggactcaggatacaacataactaatttaacaaaggtaaatataccaaactgaatcaattcattattagaaggaacttcatatgtagaaaaatagaggttgacttggttgtttatttcatccacattcaaaagattacatcttaaattataagttgacatctcgagttttatccaggattgataaacaatatcggttgtattcgaacaaattgactgagcaatgctcttataattctttacattaaattttacaataccggctagcaatccgttaaccagatcaattattttatatatctgtctcttaaattgagaaacacttacttccttacttttaggttttcctctgttagtgaagttaaagataattttatctttctcttttagataagttcccccatggttaatagcatttctaatatctacatcaatttcctttgttaaaattgtacacccttttgaattaagcaaattgactaaagggcctagattattttgacttaacaagtctttatcatctatggtgttaagcaaattcctcaaaaatttatatagattgctaactactccttcaactaacgaattatataaaggcaaatacttgacttgaatttcagtgtctctcggaattatagttttattaaataaattcaatgtactcagtacacgatcatatgatgaaagggctaaaaaaagttgtctagactgtctctgaagttctcaaaaaacaaatcagtgttaacgttcttgcattttacttcatcaattaagttgtaaataaaatctttaatatctttattccaaaactgtttctcctcatcaaatattaaatcataaattaacggaagccatgtcttaggtatatattgtatcccctcaatattttggtctattctctctttgtacaccttcataactaattcactatcaaaccccatgaaatctaatgatccaaatgcagcttcaacgtaatcactgttcaattattccctctcctagctcctcatttaataaaaggattcttttatcttaatagatgttaaatttacactctccccatctatttttaactgtctcactttctaattttaatttgaatatagctttaatagttcttccactggataactatctgttttatttatctctataaaatattctaactgccaattttgggttttaatagcttgtttgctagtgggattctcccatctagggtaaactcgaattgccatttttccttttgtgtcggatgttttaaggatattttgttttacaagaacttcttttggaaagacaaattgtccgaaattattatttctagtaaaagtgttgataaccaataaatcagttgccttttcatatgaaaaggcttggtttttaccatctccatctttttcccaaaaagaaacaaactgtcctatcttgttaggtgttatttttgcaactctaaatcttaccgattttgaatttaattgaaacatacccgccccatagtctgaattttgagcttcttcctggatagcatttagggttaagcgattaggtttatataaaactttatttacatatgttaacgccttataaaattcattcaatgctttgtttgtactccttatttatcgttgtattgcaacctttttcttatccatcttactcgacccctttcaaaataaagtaaagccaagcaattctgaattatttttatttctttttttgactcttaatttaatccattcttcatcatcagaatatggtttcttggttgttctataccatccgttaaaatgagcaactaactgaatcattattttctcagcttgacctttagagtccatccctaattgtgtaaaaccatttttactacttagcggatctcggtctcctggcttatcaaactgtttaagagctatgtagtatctcctgagtctgtaccaaagagttatagagccaccaaagtgatcccgatagtgattaacattaagttttggtttatagccctttgactttaaatattcggcaatttcttcagcgccaaattcttgacctatttgacctctttctttaagcacattctaaaccccactctgaataaaatgattatttcattactattatactacaattttccatggtcacactaaacaaaaagcagtctattcagatctgctttttattgttttcttcttttaactttttgtttattttgaacccaattaagatattgaaaatagctgctggaagatataaaactcctgcacctattattcctaatgcagtacttgagctcactataaatgtctgcatttctgtgtttcttgacttcaagcaaagtaatactaggaggccagctaaaccccccataagccgtgcaatacctggaataaagaaatctgttaggactccaaataattgccctataattgatagcataatccctaaaaaactggacaataaaactaaatttttaatgtcatttcaccccttttcaaagtatatcatcgggctcgtcatggtcaatcccatatttgcctttgattttctcgttcccacaaccaggattcttttcgactcataacgagctctcactagctgcgctcaatgtttttggtaataataggattttacccaatgataatttcttcccttattttcacaccattcaataaatccctttgattgtttttctgtaaacaacacccagtcatttaacagatcttgataatagttaagtgcttcgttattgttatttcttgtttgttgacattctaccttgttgtttaactgtattgacttaataataagtgctgtatcttctttaatatcgccaaggtacaaatcttcggatatatgatgaaatgaataccaaagtgcgttcaaatttatatcgattagcgttaataaggataattgttcattgctgccaccaagtctaagcgcattgtgtaagtaatcgacacgtttttcagtatttaaaaacacgccataccacctatatggccttggatcttccggattactcttcatccatccctcaagtaaaggctttaaaagttcctcttccaaaggatgaacgagtacatggtgaatatcatctgatgtttcaaataaatcaaatagccaacatgcaaacttctgttgggcattattatcccatatctttgcttcatcaataaaagaagataatgctttaaaggattccttacgtaaccctttttctttgagggagcagaacttttgaaataatggatattcatccaatctgtcacttttcaagatattagttaagatatttaccattgctcacatctctcttcgtttagaatcaagtccatgttatatttagcctttgtaccttgctatatcactaagaataacttgatttccattttcctttttctacacctggatgcatttcaaaatgattttaattgaacttgaaagtgatatgtacaataaactgagttgctatcttcaactataaagtatgtatcttggattaagaaatttgtaaagccaactgttttgagtatcgctttactcctcatgagcatatccatctggatatcattatcagttagaaggtccaaattaatagtaaacgctgtatgtaattcaaagaaagaattatcaaatttaaagtttaagattttcagacaccccccccaccttaccgtttcctttattatacagcgtgatcttatctaattaaaactgctgttttatacagaaaataatgtcctttgttcctttccctctcccgtccattgcagatgctagccacttcatagtttctttaatatagttttaataataaaagcttcatgaaaaaaggtgattttttgcccgcttgaacgccccctcaacatttttaaaaattccatgggcgtttcagtacattctcctttccaagtttttgtttcattgcctaaccattctcccgggtaacgtctttttcagatgacactttaatctctccattctgtgtgaaattgttgtttacttaattagatgccataacaaaaaaagcttcctaacttcagatgctggtacgctttctttcttaatatatgaacataaaacgactacgtgcattctcttgtaaattcaacctttctatatttagaaattttaatattcgaaatttatcctttccctctttacttatatatggaaaaaagtattatttacctaaatgaaaaatagttaaaaacgtagcagaaagaggttattaaatgaaaaagttatttgttacttttcttgtgctaatctccttaaaaagattgcactagtaagtattctctagctaccttgtcaaatgatgactgcaaaacaagctggggactatgtattgtgttcccaagtaaagaagttaaactttattctccaaagagtcctataaaggtagctgtattagatagtgggattaatagctctctgtctatttttgaaaatagttcaataacctcatatgatgctataaaaaacaattccactacaaaagattctttaggccatgatacagccatagcgggtgttattatggctcctttaaataaacaaacagtgcaaggaatatctcctcaagtgaaattattcgatgttaaggttcttaatgataaaggaggtggtgaagtccactctatgaaacaagtaaagtctgaatctgaagaatatgtattttttgagcctattttatgtaaggttaagcataaatttaagactaagcacggtaaactccgcataccttccttcgaatcctggagagtgtaatctctccgttacataactccttagagcctagcttttaaaatccgagtaaaaatttagtacatggatcaattagttgctatcgaataagaactttagtgaattaattgctcatgtcttttataaatttgaattgtccttttttatctaattctaaaaacaaatcaatccgattttgtgaactacttcttcctctaacttcactcattcttcactcatttttgcttgaaacatttcttctgcagatacttcatgagctttagcgatccaataaatatcttttaacagtttttgtgcattattatatgaccagattgtgtatggaaaccgagtttgaattacagcagtttcatcatctggagttgctaccgtatatggtaatgacctgtcaaagatctcagtgtcatagtcataccacaaccagagcatgtcagcagtattatgtatgtaatatcctaagtactctcgttgaaagttcatctgttcactcactgcttttaaatagaataactattttataatctcttcttaataccctccacttaaaatacagtataattgtaacttggatacactaatctatttacatataattacagtgtatttcattaaaaaatcaggagatgattttattgaaaattaaaaaggttattacaagttccctcttattaacgtctttatttatttccgctgctaccgcttatgctacacctgctacctctgttaaaagtcaagatgctatccgaatccaaggagatcaaatggaaatgactgtcgtgagatactacacccaagaagaatcccgtagtatcccttatacgattcaatatgcagagaatggttggtacggaaccttgactgcaactaattggaaacagcaatctgatcttagagttagagttgaatatacagggactgtttacttaggacaataataaatgaggggcgactagtcccttatcttatttttagttaaaaactatcttttattcaatctctatattcaacccagttgatctaactttgatttccctcatctctccaatctgtggcatatataaatgtttcttttcattagaaacaatttcacccttccaacaaccgttttgcacaaaggattttgtcccgattggtaaagtttgaagatctgcgttctctatgtattctccctcctctctataaatatctccttgttcagaaatcctccttttcgaaactttaatgtcgattttgtaaagtgaattttcatcctcaatcattaatttatatagccaatcagttatttttgattgctcttcactaccgttaaccatatcgaaaatcttcctgtacatgtcattcctcttcttttgaaaaatacttgtctcacctctttaatagttaaagtttcttgattttgcacttttccactcattaactatccacttcatatgtattcattaatttaatgataaaaccacgattttaatttaactttaatatgcaccatcttgagaaaatcccctttaattggtaaactcatacttaactttttatatacaagtgggtgttgccttgaataaaacaatcggaattgttggattaattatcagcatactagtgcaaactttttcggccgatgaatcgctatcgcataagattgctacggctttgttattggtatcaataatgatttataattttgaacatgctaaggattattctaaaaagtcacttgttattttaggagttacctttattcttttgatgctaggagtttatcaactgctctcatttaccagcgattactttgaaaagcttaatgtgaattttagatataccctcttatttgaaatagcattaattattgcattggtaacgattgcagtaaatgtaatgaagtacattgcgaatcggttaaggaaatcgactaatggtaaagagttatagctctttgccttttttatgctaaatgcttctttctatgcggtcttttatgtatgaaatcaaatgctaaatcaacttttctctggttccctttcctctgttactcgctgagtaacaacaataagttgaccgttttcttgacgatcaatactcttaactgaatatcctttagaaccgtaatattctccgataatctcatcaacgtggttactaagcagattcctctttatcacctgaaaaacctccacttattttatttttattctttattttttttatgatttcatcctataatccatctctccatttgccctctcctctatcacgacattaaccgacacacaatttccatatatatgggagtaatttcgctatttccccaacagataaatccatataatgtaattgtaagaaaaaattataagaatgggggatttacatgagttacaaaaaagtaataacaggtgttgcattatctgtaggtttacttgtttcagcatctccagcgttcgctgcaagtactagtcccgataaggaaatagtaaatgttgcaagtgatgattttaaagctcaagctatcaaatgggatctacctagtactactggtatttttgccaatacctttgaaaaagacggtatccgctggtatttaaaaggtattacaaaagtctcggaaggaaattggattggccactatgaaggtgtacgaatataagatcaaaatgggggggcatctagctccctttttaaattcatagtttgccagctctatctggttaaagtaatccttttaaacatagttcaaaagcacataccaattttgtatacatccccattaatacatctccctctctttaaaacagtctttttatcaagtgtagtgctactcataaacaacaaagacattatgatcatcaacaaacatttcgctgccatcagacaagtgtatccaaaaagcctcctctggttcatctctatagtcataaattgcgactacctttgtatttgattcttcactcactgactttctgacagttatttttatattatcttcaggcaaaataattgatttaatcattcacttcaatccaatcaaggtttgtattgcaccgttgtgcttcaagtaacatctagtcacaagattgaaccttattcgttaatacacttggtcccaacttttctgttctagcattagaaagacgcacttgaactttaacattcttcatttcggctgtaattgagtcaatccttccagcccaactaggactgtcttcaggtgtaggataaagtttaaatcgccaactaatctcacctggtttagaagcaaaaccttcgtaggtatcgtaatttccatatgaagatggttccggaagatgaacagcaagaatacttatattggttcttggagcactaggcggatttaattgcaccttataaattaatgccacgccttttacatttctaaggctctgatcaacaggttccattattacactacaaggcattgtacttgcttttacttgaattggataggcaacagcagcagccaataaggatataaccaaaataaatcgtctcatggagagttcctcatatttttttggttaatttcccttatttctggatcgattattcatatgtatttgatctggacttcaattttattttgatttaatttcaacagttaaactgtctggatagttttttaaatcaagtgcgtttacatgacagtgacctacattttcttctttatcaacgtaattatagaagaacttttccccattattgatgatgacttcgccatgatgtatgtactccatctctgatcccttgtaccaagttaccttaacctttgtgctaggtttgattttatttaaatcaaatactgttatttcttttagcaagttcatttttttaacctcctcttctcttttacttttaatctaattccctcatgtcctcctgctgctcaatataacttttaaagtcctcccattccctatcaatttctttaatattcctagcaatataggtttctgtaatgtctggatcaaccaacttttgaagagaaagttggtacataaattcaatctttgatactgtttctagaaatgactgggcataactttttgctctatttaagcgatattgactcattccatgttttgattcctttattattctcactcccttttaatcacattaaaatgcagcttttatttagacttcatcagcttgtctaatagtgtctaacaactctttcttcttgaaatatgtctttttccaaacgatccacttccttttgcaattcagtagcagcagcattcttcagaatccattctcctactccacagacttccttttgttctttctcaaacgtttttatatgttgatcttcgaacctaacccttactcttgttccgttttcaaattcattattaaaagcagctgctttcttttattcttcaagctgcttaatccttttgttgttgttaaatgagttacttacaatatttcctgattcacgagtagtacttataattaataatggaaagcttatatcacctttaggtcttaaaggtacgttgaggttttgactcggttagtaacttttggagaggagttgctgaccatctttttcattaaattaattgcatacagaaatttaataatggaggaatttagattgctgcttaatgacagagattgctgcttaatgacagagaacgttttttgcttgagtatcttcttgtttctaatcggatcaaatcgtcgtttgataccttctaatatactcactatctctgtcttttcttcttcaagaaaagctccaagaaaagatccttttgaaaattctggtttaaaggatctaggactatctatgagctcaccatttgatacaaatatactcagtcttatgtccttcgatgtcttacggaagaactgtttgataaggctagagctctacatagaaatatcggtgagcgtgtttactttttaaagtctgacgtctgcattttgtatcatgagtggatatcgtgacatccatttgctgcgacttcttttcaaatgaaatgaccaccgcaaaagaacagattagcaagcggttgtactataataaacacctaatggatacttattttaaaggaaagattgaagagcataatgtcattacggattgcgacattgataaggtgttacataagatgtacttaagatttggattcagagagtataaacgaaacaattatgagcatgtctttgatcttttgggtatataataagtcttatactgctttttagtaacaaatattggatttcgagtttttttcggctgactcacaaattcgaatgaaaatcaagggcaaaattaaaaaaatgaataattaagagggtgtataaggcttaatattattaatcgttaccgtaacagcaaaaaatgaatcgaagacttatttttatgcaaattggcgaatatcaataacgtcttagtcataatacttaataacctaaagcaaaggctgaatttatgaaagggttattttagatgggtacatataatagaagaaactcgtcacagataaatcatttagatggacggtgaggaacttaaataagctgcagaaggaagatatgaagttgttcaatatctccttaaaacaaccactttcccctactcccgcttatgttttacgatcgtttaccccctattcactaattaaagtatcaaaaatccttatgtttactgtcttttttagctcattataaatttttacgataagcatgttattcgtgtacgatatacgacttgactgtaattggtgacgatttaacagagatatttaatgcacttctaacttttttaactgcaatgggaatcattgttgacccaacaactcaaggtatttctgatagtgaacaagcaatggattatgataaaccccctccccttctcttaattgaggagggtatttttttcgtaatgaaaaaattgcagaaaactttacatccttttacaattttttcaatgactatgttatgattgttttcgagagatttttgaaattttcagaaagaggggtttggatgagtaagatcgcttcagaagttgtcgctactacactgaatgactggtacattgctataaaaaagcaaaaggttgatgagtcaataaaatattattcagagataaagaaactttttgatgaaatggaagaagatcaagaagttcttgcgtattatagtttattagaagaaagacataaaatgttgctacattcctcacgaggagaacctttgcaaaagcacacctattttactgaagacaatcaaaacttcattaaaaaaacaaatgataaattagaatacaacttttatctatttgaagcaatgtatgaggcatacaacaaaaactatgatcgagcaattaacttatatggattagctgagaaaaagcttgcagaaattccagacgaaattgaagcagctgaattttactctaaagtctcttacttatacactcttgttaaacaaagcattgtggcacaacattatataaaaaatgcaatttcgatatataagcgacaccctgattacaaatgcaaacttgctacatcaacaatgattgcagctgcgaactatgctgatatgaaacgatttgaggaagcagaaaaatattacttagaagcaattgatattgcaaaagaaacaaaagatgaatttttgaaagctcaattatttcacaatcttagcatcgtttattctgattggaataaacctgataaatgcatcgaatctcttgaaaaagcaataggaaatgaatcttggttacattcaatttattatataaattctttattcatgataattaaagaactctttaaaattgacgaaaaaatgaaagccattaatttttacaataaagcacaggaaagactcatattaatggagaataaagtatacgaagccaaaattagcatcttatacaacctttattgtggtgaattaaaaaataatttcaataattgtattagtaatattgagtttttaaagcaacaaaatgaacttgaaagtgtagatgaattgtcctacatagctgcaaaaaggtttgaatcaataggtgcttttgaagaagcaacgagctttttcaatgcgaaaatttgggctgaacagaaaatgaatcaggtggagggaatcttatgaaaaaacttgtgctttgcgtatctattttagctgtgattttaagtggagtagctttaacgcaattgagtacagattcaccatctaacatccaggtagctgaaaggcctgtcggaggttaaaaaaggttgattaattaatttagccctactcatacacttgagtgggcttttattttatgatttatgtccaccagtcaacccagctctgtgaagcgctgtacctgcaaacgtaactgagatatttctcactgttttgcccgagtaaaacttattaaagaacatcaagcaacacttataaatatccatcgtgatatttgtgggaaaatcaattgttttggatcgatgaaatccaccaccaagctcatctttactgtaaccaattccaaggctgatcgttcgaccaactttattatgtgtacatgcccttcttgcgacttcctcacaaatttccaaaagaacagccttaatctcttctctccttgtataatccctcagtaaaatctgactcttatcaaaactaatctgaccttgcatcaactgagcacctatttctgataaatcaattccatgcgcatgatagtacaactggtttcccattattccgaacttcttttcaagcagctctaaaggaaatttagctaactggcctacagttgatatacccatccgattcaggtttctttccatcctccctcctattccccatattttagacagtgaaccttccagagtttatttggcacatcttcatatctccaacgtgcaataccactctttgttttcttactctccaggtcaagcgcaagcttactaagcaacatattgtcaccaattccaactgtgcacatcaaaccaaattctctccacatgctgctttggattgctttggccatttcttcaggattctcttttcctgcatctaaaaaagattaatcaattgaatacgtgtggacacatttttcaggaacaaatctgtaaaacagctttgtaatctcagttgaaactctgatgaaaagcttcatttgtggatttacaatgtatattcttggatcttcaggtatctcaaatagtctcgatcctgttttgattccaaaatcttttttaagtgcaggagatgcggctaatactacacttacctgtctctcgatatttcttacaacagccgatacagaagtataaaacacaaagtatattcttacgtagaaattgtgagtaatcaatcattgtatgtaactccttgttatatatactgtgttgttatgttgatctttaacgtgaagcttgtgttgttcaaaattaatgtaatgaactcttccggcggcattttcaaacaaatccatagttgtaaagtttgaatttcaaaatttaagtgcttcagaaacgagaacgtccatcatctcaatttttgatccatcaatcaaatcttgtttaagctgtattaaatgttctagcatcattgatgtccattgattgttcctcgatccctaaacatatcgactcactccttgattgatctaatatcaacagaactaatgttccttattcaatgcagataagaacaaacgttcgatgtaaatgttggtaataaaatataaaggtcaataatgatatccgtagtattaataaaggagagattcttttcgacgagggagagtgtgatggtgaatgaagaagaggttaattggatttttggtcttagttcctgctttgattatgtcgggtataactttaatcgaatcaaacaaaaagacccctgtagaagttttagaaagtgcttgggatgaatttgggttatttagttttgaaattggaataacagatccggcaattacaataggcatggatcaaaccaaaagtgaagcaaaacttcgtgaatatttaaaagataatctgtctagagaagccaaggaaaaatataagatttatatattcaaggacgatattgttaagcttgagaaagagcatcaagaatatttgcaagaaaataatctcaataagtaaaacgcccagcacttattgagctgggcactgtttcatatttaaattgaatttttataagcattaatagcttcgtttcgcaacaacatattatttttgttaaccatgcctatgttgtaagcttttttgataatatctaatacctgtgaatctaatgcagagagattacctcccggattaaatcttgatttccaataatctaaagacttatttaggtcaagtgagctttttttgttctcgggtttaactacttcatttttctcaagtttttcacagaattcactaaaactaattgatgaaagagtaggattatcccctccatacccttctgtagccaaactgcaaaatgctaagaatttcggatcataaataagatcgcttgagtttacattcatcacagataatcacaatcctctcagagctttttataattgtattaccttttccatttttacacatgttaaatatcgacaatccctcaaatcatttaataaggttatgtcaaattttaatgttgataaatacgcaaaaataaaaggaaaccatagttccaagtaccttttaggctttctaaaccaatttttacagcgtttagtccctttttgacaacagttgtgtttgaacctttttctgtcgtgcttttataagcatttgaaagtttactaaaagttgactctaaagatttaatggacaaatcttgaatttcttggctaacaatcttcatttacaattctcacttttcgttttaaaaacaacacctactcaatagttgaatttaggactacgccttgaattttgcgattcgcaaactatcatatcagctacagctttaaatgtttttcttagcttcaccatttgtgaccttagtcccttgtactctttggctcttttatccgcttcagagagcaatgaatcagcttcaaataccttcatttcattctcctttcaagcctactctatgtaaatttcaccacaattatttgcttgaataacagaaaaagacagccagaactgactgtcttatacatcgtgcgatcgtgttctataataattttctgcggtatagtagcaccattcccaaaaagttgccccattggattctatataccgatctagaaatatctcaaaatttaaatttaatggtgtatattcccctatttctaatataaaaagatagttgggatcccctttatccaatttatctttgtcgatcatcaaatggcacccttctaataagtgaccaattgggataccattgatgccttcaaacaaatcctcatattttaattcttcttcaatctcttcaaggctaaataaataaagtcctccacctatattctccccatcagaaagaatttcaaaaattttcgcaccgttatgtagtgtcatgaacttctgataatcctctggaagggtaatctgatgtttagcttcaaaactttgaatgtcgttaagggttgctttgtcctgtgaaaatgtaacaaggaactccatgatatctccttcagaacaaaacaattgaatggctcctttttcgtctaaaagacttttcaagccatttacagtcttatgaacaaagttagtcacatacatcacccctttatttccttttaacaataacctttcaaattccaaaagatgtgaacagatcgtgataggtgctcttttcagtgaatataatgcaataaattctaaaaagaggtgcctctaaaaattgaattctctaatgaatgatgacatggtaaagatcattagaaatggccttagcgcatcccagcatccaaagcatattcttgttgtaggagctggattgtccgggcttgtatcagcatcattgctgaaaaatgccggtcacagagtaacgattctcgaagcgagcggcagagcgggcggccgtgtctgcactttgagagctccctttagtgatgatttgtattttaacgctggcccgatgcgcataccgaataaccattcgttaaccttagaatatatcaaaaaattcaaattgccaacaaatgtatttctcaacagaaccccgatggacatcatttatgcaaatggaatcaaaacacgtctccaagtttttgaacgagctcctggaatattgagatacccagttgcaccaaatgaacaagggaaaacatctgaagagctgatgctttctttactgcagcctattctaaattttatcaatcaaaatccagcgagaaattggcggattgtcgaagaacaatacaaaaatcattcgttaagctcttttttaaacacgtatttttcatatggcgcgatcgatatgatcggtgtacttttggatatggaagcgtatatggggatgtcccttgttgaagtattgcgggaatctatctttttttcatcgcccgctcacttctatgagataactggcggcatggatctgctgcctcacgcgttgcttcctcaattaaaaacaaacattctataccatcaaaaaatgatgaaaatttctcaggggaaaaatcgtgttacgatccattgtcagcatcaacaaacggcagaattcacatcattcacagctgatctcgctattgtaaccattcctttttcaacattgcgatttgtaaaagtcgaaccataccattcattctcttactataaacgaagggcaatccgtgagctaaactatatcagtgcaacaaaaatcggcatagagtttaaaagccgattttgggaaaaagccgggcagcgcggcggcaaatctattactgatctaccgattcgtttttcgtattatccaagcagaaatattggagcaaatggacatgccgtcattctggcaagttatacttgggctgatgaggcactgatatgggacagtctttcagaaggagagcgaatccagtatactttactgaatttatctgaaatctatggtgatattgtgtggtctgaatttgtgtctggcacttcttttagctggagccagtacccgtattctgcggggggatttacagctttcgaaccaggacaagaattagagctgtatccctatattcctgtccctgagggcagagttcatttcgccggagaacacgcctcactcactcatgcgtggatgcaaggcgcgattgaatctggaatacgtgttgcttatgaggtcaatcgcttaccttagatcatgctcacatcttgttaaaactggttgatataaaaagaagtgaagaatttatactcctttgtttaaaagattaattcaaatatgggatgtctcaacattcagttctttattatttttatacacgttttgaatgcggacctcccttttcttccataatcattaataaatacccaaccatagaaaacgttttaattaaccatcgggcgaactttctttcactgtataacgattcttaatgttgcttttttatcctttacttgtcctctctttttttcattgacttacatttcttgaaaaccagtataaatcctaaaggaattttgtaacaaatacagaattggaaagataagcgccaaaagaaatgctaactccttatctcaaagacaaaactgcgcttatattaaaagaaagaggtgtctttagaatggttcattttaaaaactgccctgatccttctctaaacgccaattctcagtctcaccccgaattttcatccgaattagaacatattaagacaagaatgcaaaactttattaagcactcggttacagcccaaaatatcgaagttactgacgcaagggtgacggccgaaggagaggtcacctctcttttaaaagaacgtctcgacaaggaatattataggcttttatctaaaatcacccgggaagtaaatgtggctgacttcggcgctgttccagatggaagagacaatactgaagcttttcgaaaagcaatcgggaatggccgagtcaaagtacatgttccagcgggagaatacctcgttcaagggattaaacttccatcttggacaacaattgttggacaaggtaaagggatcacagtgattaaattgcatgaagacactccagcgcatgaatgggtgattacaaatgatgattatcaaaatggaaatcgcaatatttttgtccaaggaatgtcattagactggaatccaagtagacaatgcggtgtgagaaatccagggggacagttctccagttgtttaacttttgctaaggttgaatatgggtggatcaaagatgtggaagcgattaacgcaggtcttcatggtattgatattacatcgccaacgtatgaccatttgcctgataccgattggacaaaagacggatcaagatatatttggatcgataactgtgtgacatatggttcaggagacgacggcattaccacccattatagcgaatacatctttatttcaaactgccattcaggaaatccgcggggaacagaatttgctgaaggtgtttcaaactccaacggaatagaaattgacgacggctctaggcatgtgtggcttttgaataactttacaagcggcaacatccgcggagttgaagtaaaagcccatgaactgtggccagcctctcaaaacgtccatatcataggccatatttcttatcgcgatgttcgtgcatttgatcttcgtcatattggtcaccatcaaattacagatcctgaaagcacaacagcatacgatgtcacactcattgattgttcagcagttgaaccagttttcaactcgctttacgatgctgtgaccccaagagcgctggttatttcggcatataaaaacgttaatgtaagcggattcacagcgattggtgatccagactatgattataaagaaaaccctgtcgtagccttgcaatatcgcagccaaaatataaccattaatggtattaaaattcgcggttttaaaaaagccggtgttgatattaatttatcaggcggatcaaataaaactgattatattaaaatttcaaattttgatatttataaatctgctccaaaaggaatttcaatcggtggaggcctctacaatgtcaatattctaaatggaacgatgattactgacaatgggacagttgcaattcagtcccccaataatcaggccacaattctcggtgtacaatcagaaggttatagtgtggcagcctcaatcaaaggccaaacataccaacaagttccaatcaatttgaaaggaggcatacagcttgcaacgacctctggctttgccgttaaccaaacaagcgcagttatagcaggtaccggcgacattacggcccgcggagaaagaaatgcggtcattagctcttctggaggctccagtactgaaggctctcgcgcattaatcgcttcttcaaataacgcacatattagaggaaaccaagcgtcaagaacaatactgtcttctgaaaatattatacttgaggaaccatacaccgtggcaggaggtcatcaatcaataaagtggcttcttgactctgttcggggaaacgggacgtttgccggtgcaatcagttcttctttaggtggatatggagagtattttgagagttcaactggacagttaatccatactggtacaatcgtgactttaagaggtgaaaaaattgtgcccgcgaatgttggagattatatgcttggcgttatttcagaaacttcagctttcatttcaggagcctccagtttcgtctggcagggccgttatttgacaaatgagttcggcggatttatttatgaaacggtgactgatgaggaaagcggtgaactcatacgtgttcccaaacaaaatccagactacgatacagcgctggaggcaaattatcattcacgggcagcaagagacgaatggcacgttgtagggttggttggccaacattatgtgcgtattgacgaaactgtcaatcaaggagattatcttacggcacataatggaataggaacaaaagccactgaaggaagctggaaagtaatgaaaataacctctgcttacacatcagaaaaagggtatggtatcgctctaaccgtcatcaaatagtggatacgccgaccagttcaatatatgtttatccaaataattagatctcttttctaggttctttattccttgtatgttattatcaattttcaatatctaccaaaacacccctaatatactatcgtaattaacttatattataatcaaaaaaattttgacagctgttccttctcgttattcatgaaagttgctattgaaatgagtaaatggatatcatattagacttctatagcaaatacaccatatatatcctttaagtatttacaaattgaaaatgtttcatgaggcttattaaaagtattgttcttttatcatctgtaagtcgatacaaattgcattaagatcacacctaaatcacactgagttttttcttacaaaaaaatgaaaaccctttccattctaaattcatttcaccgttactaaaagtaatccttgcattccttcgcccttcatgctatattcatatagcgatgagctgaattgtgtaagtcgatgtacatgcctttacggcacacacgaatgtggcgtgtggtgcatcgcctcaatacgcaaagacgtttgccttaggcaaacgtcttttttgtgttatccgatttttgtgccgtttgaaacaggctgatccggctgcaaaaggacgacatcgccctggccgggtatgccgccgaggaccaagacttccgatttaaatccggcgatccggcggggcggaaagttcacgactgctatgacttgcttgttgacgagaccttccggctggtaacgcttcgtgatctgcgcgctcgattgttttatgccgatttctgtcccaaaatctattacaagcttgattgccggtactcttgcttcaggaaattcttccgcttttacaattgttcccgttctgatatccaatttctcaaagtcttcaataactgccatatcaataactcctttttctcctattgtaaaggagatatacaatattcttttaactaaagagccatcattttttatccgaatataaggtgtttcgatacaggcggggcggcattcctgtgcttttcgtgaaccatcttgtaaaagaagaaaggttttgaaagcccagcgcctcgctcacgacggtaaggttttcatttctctccatcagcattcgttttgcttcctcaaggcgaaggtcggcaatatagttctgcggggacttccctgtctgttttttgaaccagcttgaatagtaagctgggtgataatgctcgatttctgccagcttcttaatcgtcagccgctcaaataaatggctgtgaatgtatgcaattgaggcatagctatgggattgaagcttttcttttatgtattgtactagcatatgaagcgagttggctgttccggcctttgcttcctctgtcagcaagtacctgatcgaagaccagaaaggatcgagtgcagcttcaattcccgatcctgcacgatactcatcaattttcattgcgtgaagcggaacatccagtacaagacattcatttcttccgatagaacggaagcgatgctcgcactgcggcggaatatataaaaaatgatccggatttaatttcacctggcgcccctcagtctcaagatctatactcccttcaagcggaaaaagaaattggctgtacgcatgcttatgtgaatgataaaggcgtgtgtatgtccgtttttcgcaaatcatctcttgaagcgaatccatcagcaacccccttcctttggtcatcttttaatccggtaatggtgttccgatataggcgaaaatccgattttttcatataaagaaactgccgccagattttctttcatcacttgtaaaaacatgcgttccgctccgttgttttttgcccattcagtcaacatcctgatcacttgggttcctgccccttttcctctgtgctcctcagctacaacgatattactaagtccgccataaccatcaatgacagaaaccgtgccaagcgctgtcaggctttctttgtcatacatcttgaaaaaagttttacacggcggcatgcgttcgaatatgtgtttgtaacctttgtgacgttcgggtgaaaacccttctaattgaataaattcatctatccaaacagatgatggctcttgttcccacttgtatgtaaatcggctgttgtcatttgttcggctcataattgaccggcacaacgctgtcatctggaagcactcgtctaccttttcataacggctgtctgccaatgcgtcatcaagccctttcggtgatgcgttgctaatatgaaaacaaacaggtaagcctaaactttgataaaaaagttcggcctctagctgaaaatccccttcaggcatatccgcagacgtccatacgctatttgcccttttggttacgccaaaattcgctctgagaagccatttccctatgcttttttgaaaataagccggccatgaagctgccgctaatcgttcaatcttgcgaatgtcatccattgcataatgcctctcccctatgtatactcccttgatattatacaatattcagaaatataagacatccatttatttgtttacataatatttttattgtttattaataatcctgacaaaaatgtccgaattgaaaatgacaggctttctaaaatgtcctcctcacgttcaaatgcttcttttgcgattaaaacagtaaagccatgcagcagacttctgagcccccttgtcgcatgaatggcagtcttttcacttgcatagccgttttcaatgagcagcttcgtcacaagacagacaatttggtcagagacgatttccgtccgtttgtcgtgaaccttaagaagagccgcttcataatatccgggattttcaattgcaaaatcaacatatgcatgagctaaagaaagcatcgcggaatctccctttcgttcggttacggagtccgccatttgatcaaaaagctttgtcagtcctctgacagcaagttctgctctgatcgcttgcagcccgttgatatggttatacaatgacggggggcgaacattcatttttttagaaagtgcggcaagtgagacaccatttaccccttcctgatcggcaatctctgctgcagcgtctacaatcattttttgggtcaaacctattctcggtgacatgctcatcatcctttctttgctttttggatcgcctgtctcatccgctctgaaggtgatcgcaggaattttccatgtccgacagcgagacaggaaggcgccttatctgcgagcaattgtgcacttttgatggcctcctccttattccatgtggcgaaagcgggaaaaggaaacgtccattttatctggcctgatacagcgattcctccgtgcaactgaaacgcatctcctgctattaaagtgccgtttcttgtatcaagaaatgacatgctgcccggtgtatggcccggtgttggaatggcaagcagagaaccaattgtttcaccgcccgtcagcagttggtgaggctttgtttgtatgtgtttcggaatacctccttttataggcgtctgcggctcatcttgccgcaaggatgtgtcaccttggagcaagaatgaatcccgttccgagatcatgacctttgcatgcggaaatgtttgtgccaatgtatccagtgatccgacatggtccccatgtgcatgagtcagtaaaatatgctgaagcggttttccaagctgattcacagcttgaataatccctttatagctgcctggcagtgcggcatcaataagggtgacttcgttttcttcctctactaaatagcaattaaccggaaacaatgctggaaaaaaagtcagctgccaaaccgtttggtactgagtcattctcatctttttattcctcctaacaaaactaatggcgttagttttattattaactaacaccattagtttttcaagagtttattatttttttatcgctacataaatgttaacttgtgctcgctgtggcactgcggcactttgatcatacatctcaaaatcacctgtaaacgtgcgcagatgccgcttatcccaagtccaaatttccttccacgtttcaagcacaatctcttcaataggaccgattctggaagtgaaaacggcgtaagcggaagccggcaaatcaatgttttcatatggtcccggaagaatgtcgtcgtattcctgaaacgttccgactgaaaacgtataaaacccattcgtctcttgttcataattcgaatataaggcaataatgcttttgtctttttcagcctgtgataaaagagcgctcatatcctgcttccagaattggtcccacagtgccggaatcctcctttcttccgtcatttccagtgcgttgcttgtccgttgtgacagtccggcaaatcgtttccggtctaagtgtgttatatgtgaaaagcccatacgatctcctcctttttttaagattatagacaaagaaacctgacagcagtgtgtcaggtttcatatattttttgcatgtgatgaatggtttcttttactttatcccgtatatgaagaggctgcagaacctcaatatcctttccgaactggagcaaaaaaccgatcagccatggatcttctggaagtgaaatcactgcccggcagatttcatcttcctcacaacagtgaaggacatcatatccgaaccattcacctatgcgctgacgtgctgacggctgaacaagaataaccaattcagttaaacggtccttttggtaccaactcttatcccatggcaaagtgtccagctgaatgtcttttctgataaatgtctgatgtaagatagccagatctttcatccggttcagtttaaaaaagcgaaaatcatttcttaccaggcagtaggcatataaataccagtgccccgccttgcaaaccaatgtataaggttcagtttcccgaagtagtgtttccccgcttgcgcttgtatatgtaaaagatatcgttgacaaccgatcgatggcagcgctgattttctcgcgcagcgtcttttgatcctcagtatggccccaagccgtcatgtcaataaaccatttttctgtttggtgcttaaatgcttgagtagattgttcaggtataaggtgtttgattttttgataggctgtgctgtgagaaacgggttcatacatagatgaaacgctttgcaaagcagaagcaattgcaaacaattcctcctccttcagccactctctttcaagccgatacgtttccatgatgccaattccgcccccggaaccctgtgaggtcacaatcggaataccagccctattgatcgtctcaatatcacggtaaattgttctgacagatacttcaaacagctcagcaagctctgcagcctgcacttgttttttgctgatcaataacacaaccatcgctaacaaacgttccagtttcattctgcgcaccttttcttcttgtattttccaacaaaacaatcataacattttgataaagcttgggcatatctattatgcggcggaatacacctcgcatatgctatgaaaaaaggggtttccccttcttttttgtgttcagtatttatttcagctactatttccgaccggataagcatacacttctcaacggaggggatttcacatcatgcatcttacacttcagagcgtttatcctgccatgatcatcatcttttttctgtataaaaaaattaaaaggtccatcggataccagccgctgaagccccgctggctgttcacccgtatcattcttttctcgctgtttgcttttggactttcaatcttcagcgccattcacccttttttatatggatatctcattttgggcattcttggcggatggctccttgtctttttcgctaagaaaaacatctcttttgaaaaacgcagaggaaagatctattttcggactcatatttgggtagaaatgattctcctaaccttattcctgtcaagatttctatatcgagtgacagagctttatcttacctcgcctgatctaaacagccttggatcttacggtcagtcaatcggaacggaccctctgacaataggcgtcttttttctgatagccgtttattatatcggtttttcttcttttgtcatcaagctcagcagaaacgaactcgaacagcacggacacaataaagaaaaagacatccttgcccgctagcagcgagttaagcaaggatgtctttttcaatcatgctgcgtatgatggatcatttgctgaagaacatctaaaacatgttcatcctccggagagtaataaatcgatgttccttctctgcgcgatttgacaagccgaagatttttcaaaaatctaagctggtgggacacagtggattgcagtaaattcagcttttctgcaattccgtttactgcatgctcaccctgggacaataaatggagaattctgattcgggtaggatcagaaagcgctttgaatgtttgcgcgactagaaacagcgtctcctcgtccagatcagcagccgattgttccgtttctctaaattcagtcatatgtatcacctttctttattcatagttttatcttataacaaatgcgcttgagtgcaaaccagcctgcttgtattccatttcaatctcatagtttaaatttatgtttcaaatcaggtttttacttggtctgatataccgtcttatgtcataataaaaaaggtcatactgctccaaacattgagggtgaaacacagtgaagaaaaagagaaaaggctgtttcgctgctgcgggttttatgatgatttttgtctttgtcatcgcctcttttttattggtcctgctttttttcaaccgggatttaatcaaaaaacttccgatcgatacgaaaacgattgttttggaacgtttaaccgattacaaacccttggtggaagaagagcttgaaagccaaggactctctaattatacatcactcatattaggcatgatgtatcaggagtcaaaaggaaaaggcaatgatcccatgcagtcctctgaatctctggggttaaaacgcaatgagataacagaccctcaactcagtgttaaacaaggcatcaagcaatttaccctcatgtacaagaccggtaaggaaaaaggcgtggatttggataccattattcaaagctacaacatgggggcaggttacattgattttgtagctgaacatggaggaacgcatactgaggaattggcaaaacaatactccgagcagcaagtcaaaaaaaatcctgacctgtatacttgcgggggaaatgcgaaaaatttccgctatccgtattgctacggtgattatacgtatgcagaaaaagtaaaagaaaaaacaaaaactgttgaagaatctttgcaggttgcaacacttgaaaccatggaatccaaggctcatgaataagagtctatcaatttactgacaaaagcccaaaaatgaatttgggcttttgccatgtttacacgtaaaaaaagccatactgagtatggcttttaataatacggtgaaatcatcaaatatacaataacgcctgtaaggcttacatacagccatagaggcattgtccatctcgcaatttttttatggcgctccacctgcatgctgaagcctctgatcagcgtaaacagcgcaagcggcacaataattgcagaaaggcagatatgtgtaattaaaataaagaaataaatcgggcgcataataccttctccgccatagagcgtgttttccgcaatcgagtggtacgtcacatagcaaatcaaaaatagtaatgttgttgtgaacgcagccaaaataaagcgtttgtgagctttgatatttttctgtttaatcataatcagcgcggccaataagaagataaacgtaaagctattgaatatcgcattcagcattggcaaaatgtgaatattcgcatggctgaactgatctaatttaggcataaaaaacagcactgcgattaaaccgttaatcagaactgtcagcgtaaggacaatccccgtgtaatttttcggtttattttctgtttggttcatttggtgacctctcctaatttgtactggctatccaaatcgtatgcaaattcaaagaagatgtcaacggtttcgattgcttcgtcagaaattagacacacttcaaaggccggaggctattagccccggcctgttaggtttacgcctcttttatcaaatgttcaatgaccttatgttcattttcattcagcaggttcttttgaattttcgaatgaatgggtttattcatatgctgatccaagatatcggccgtttctttatccccggcaataaccattcgttcccatcttttcgcggcagctttttgatcaaggctggcagccagccgcttatacagtctcgattggttctctgttacatgttccctcatccggttctcttcaaatggtggcgctttgtctacagcggaatggctattcttccaagactcattgatcatatcatactcataacgctccaccgcctcaatttttcctaaaacggtttcaataattttcacttcatgctgctgagttaaaataaacgccgtacttgggtatgcctggcgcaaacccttcagctgatccaggacagctgtttcttcccagtaaaatcttgtatctacagggacttgaagcttaataggctcccatatgccgctgtcggaaacaaaaaacacgagactgcggggcatgtcttttcccattgcattcaagtattgattcattttagccctgattccatccagacacttttcctcctctggatcactagctgccaaatactcttttaatcggctgaatcctgactttagggcaatcttccattctcccccctgctgctctggatctctcatgtctgtattgagatacagagagagaattttatccggcggttccaattggacatactgtaatttgttaatcaatgaatcaatcgccattccgattcctcctttttcacaggttagttttctttttcctctcttaaaaacgatcaaacctgactttccgctaatttctagtaataatggaattgttgtttacaatacgcctctcttctaatacaattggtaactgtgtttctaagctgatttttgaaaggagtttgatcttgtttactattaaagaaaaaaatcgtcaagagcttgaagaagaattaaatgatttagaatttcaaatttatcgcatgcaggagaatatgaaggatttatctaaagatgccaaagtgcttggtattgatcaatcgaaacatgatgagtggatgattgtttcctcgattgatgatggccaaacatgcaaaattatgctaactgattgtaaaacggcttaccgaggaaaaggctgtttttcacttgtagcgtcttacaaggacgatgccattcatataggcgatataaaaggccctccgaatcacgggtttggttccatttgcatgaaatatttaaaagatatagcaagagaccacaatataccgaaagtcacaggagacatcgccaaacgggattggaatcatgtagaccggctgattcacttttatgaaaaacatcaattcaaagtatgtatcgatcatgatacccaatccggcagcattaagtgggttgatttgtaaaaaagtctggaagaaagagccaagatatgctgtaatggtaaaaaaccattgatggagggttctatgtacgcctcaaaactgaaaaagggagacgaaatccggatcgtgtctcccgcgaccagcatgtctatattatcaaatgaagcaaaaatccgagcacttaggttatcgggtaaccatcgctgaacacgcaaatgaatgtaatgaatttgattcatcctctatcgagtcaagagtccatgatctgcacgctgccttttttgatccaggcgtcaaagcgattttaacgacactcggagggtttaattcaaatcagctgctgcgttatcttgattacgagaaaatcaaacggcatccaaaaattctgtgcggctattccgatataaccgctctttgcaacgcaatttatcgaaaaacgggtcttgttacgtattcaggcccccacttctcaacatttgcaatgaaaaaagggcttgattatacacaagagtattttctttcttgctgcgcttcggacgacccgtttgaaattcttccttcaagtgagtggagcgatgaccgctggtttttggatcaagaaaacaggcgtttttatcctaataacggccctgttgtaatccaagaaggttatgcggaaggtactttaattggcggaaacttatgcacgcttaatttgctgcagggaacggagtattttcccgaaacagaacatactattttattgattgaagatgattatatgtcagacatccatatgtttgaccgcgatctgcaatcactcatccacctccccgctttttcacatgtaaaggcgattttgatcggcagatttcagaaagcatcaaacgtatcaatggatcttgtaaaagccatgatcgaaacaaaaaaagaattatccggcatcccgatcatcgcaaatataaatgccggacatacctcgccaattgccacgttccctataggaggaacatgcaggattgaagctatttcgggtacatcacgaatatggattgataaacattaatcagcttgtaaatttttttacaagcttttttagcgcaatcggttatgcatgccgcacgagacatgacaaatgtcatataggaggcatgatgtgtgctactacaaaagacttctctcattagcgtatactgaaccgagacacacaatgagaggatacttactatgactgaacaaaccattgcacataaacaaaaacagctgacaaagcaagtcgctgcatttgctcagcctgaaacaaaaaacagcctgattcagcttttaaacacgtttatcccattcttcggcctatggtttcttgcttatctcagcctcgatgtctcctatcttcttacgttagcattaacggtgattgccgcaggttttctgacaagaatttttatcatcttccatgactgctgccatcaatcttttttcaaacaaaaacgctataaccacattctcggttttctgacaggtgtcctgactttattcccgtatcttcaatggcagcacagccattcgattcatcatgcaactagcagcaatctggataaacgcggaacaggagacatctggatgttaacagtaaacgaatataaagctgcatccagacgaacaaagcttgcatacagactttatagaaacccgtttatcatgtttattctcggaccgatttatgtttttctgatcacgaaccgttttaacaaaaaaggcgcaagacgaaaagaacgtgtaaacacataccttacgaatctggcaattgtcgcgttggctgccgcttgctgtctgatctttggctggcaatcgtttttactggtgcaaggcccgatatttctgatttcaggttcaatcggtgtttggctgttttatgtgcagcatacctttgaagattcttattttgaagcggatgaaaactggagctacgttcaggctgctgttgaaggcagctcattttataaactcccgaaactgcttcaatggctaacaggcaatatcggttaccaccacgttcatcatttgagtccaaaggtgcctaactataagcttgaagttgctcatgaacatcacgaaccattaaaaaacgtaccgacaatcaccttaaaaacaagcctgcaatcactcgcgttccgtctatgggatgaagataacaaacagtttgtgtcatttcgggctataaaacatatacctgtaagccttccgcctgattcaccagaaaaacagaaactgcggaagaatgcctgatgataaaggaggtcttctaatatactagaaggcttcctttttattgttggagggtgcattctggctttcacaatgataaagttacaagtaagatgaaaagctgaaaatgaggtaagatcatgattaaaaatcattttacatttcaaaaactaaacgggattacgccctatatatggacgatatttttcatcctccccttctactttatatggaaatcatcatctacatttgttattattgtcggcatcattttgacgcttttatttttttcggtatatcgatttgcttttgtctcaaaaggctggaccatttatttgtggggatttttattaattggcatttcaaccgcctccattaccctgttcagttatatttattttgctttttttatcgcgtattttattggaaacattaaggaacgcgtcccttttcatattttatattatgtccatttaataagcgcagccgtcgcagccaatttcagtctcgtattaaaaaaggaattctttctgacacaaattccttttgtcgtcattaccctcatcagcgcaattttattgccctttagtataagaagccgcaaggagcgcgaacggcttgaagaaaagctcgaggatgcaaatgaacggattgcagaactggtaaaattagaagagcgtcagcgaattgcccgcgatctccatgatacgcttgggcaaaagctttctcttatcgggttaaaaagcgacttagcaagaaaattgatttacaaagatcccgaacaagcagctcgtgaactgaaaagtgttcagcaaacagcgcgaacttctttaaatgaagtaagaaaaatcgtttcctctatgaagggcatccggctcaaggatgaactgatcaacatcaaacaaattctcgaagcagctgacattatgtttatctatgaagaagagaaatggcctgaaaatatctcattgctgaatgaaaacattttgagcatgtgcttaaaggaagctgtcacaaatgtcgtcaaacacagccaggctaaaacttgccgagtagacattcagcagctctggaaggaagttgtgattacagtgtctgacgatggaacattcaaaggagaagaaaattccttttcaaaaggacatggcttactcgggatgagagaacggcttgagtttgcaaacggaagccttcacatcgataccgaaaacggaaccaagcttaccatggcaattcctaataattcaaaataaacataaaggatggcttatatgattagtatatttattgcagaagatcagcaaatgctgctgggcgctttaggatcacttttaaacctagaagacgatatggaagtcgtaggcaaaggtacaaccggccaagatgctgttgattttgtcaaaaaacgccagcctgatgtatgtattatggacattgaaatgcccggaaaaacagggcttgaagctgctgaggagctaaaagatacaggctgcaaaattatcatcttaaccaccttcgccagacccggttactttcagagagctattaaagctggcgttaaaggctatttgttaaaagacagtcctagtgaagagctggccaacgccatccgtagcgtcatgaatggaaaacgcatctatgcacctgagctgatggaggacttatacagcgaagctaaccctcttacagatagagaaaaagaagtgcttgaacttgtggctgacggtaaaaacacaaaagaaatcgctcaggaactcagcatcaaaagcgggacggtgcggaattatatctcaatgattctagaaaagcttgaagtgaaaaatcgaattgaagccattacccggtcaaaggaaaaaggctggtttaaataaaaaaggatcttggcatctgccaggatcctttttgttaacctgaaattccagtttgagaacctcgccgcaaccagaattaaattgatcgatatcctcgctcctatacccgctgaacgattgcttgattaacagcccaataaaagactggattgaatgatatccctgttaaaatggtcggccattgcacatcagcagaatttctgatattgattattttgtattttcagtatgacaaagttgtgccacttcgctcccgaagctgccatgcccaactgcaagagcttaatatcacaataaaaaaccgtctgaaatcaatccgattccgttccgtaaatggcatctgctacatccaactgcttattatctgccaaaaaagatacaacaccagctcgtttcgctgatcaaagatagtaacaaccagctataaatgtcatgatgccgaatgtctctgtaatgtggaaccaatcttttaacccgagagcccctgaatcgcacataaagagaaaaacgggaccactttcttttatcagcatatgatataaacagctctaagcagaacaaaaaaagacacaagccaaaagctcatgtcttttatcacaatctatattattagtttaagactttaacacttacagttttgacgccccaattagaagcatcacttttacttggtacaaatacgtcgattttatttcctttaatagcgccgccagtgtctgctgctgttgcttccccgtagccttcaacatagactttagaacctagcggaattacattaggatcaaccgcaataactttcgcattcgggttcttatttaagtcaatgcctgtagctgtaacgccggaaatgccgccgtcgttagcagtgtaagcagtagcagtaactgttagttcttttgaagcttcttgattatttgtatttgattgaacagccttctcctctgtgttaacagaagtttctgcctcagcctttgtttcttgtttaggttgctgttgtacagcttcttgtttaggttgctctttttgcacagcctcttgttttggtgcagcttgaggtgcgtttgtttgcgcattctcagtagctgtgtttgctgctgttgcctgaccttttactgaaagagttgatccagcatagatcatgtcagagcttaagttattccaaactttcaggttgttgactgtcgtgccgaatttttgagcaatcttagaaagcgtatctcccgctttaattgtatattgcccagtcgtggttgtttcttctgaagaaatggtcagtttttctcctgcaatgattttatcagaagttaacttgttccattcttttaagtcctttaggttcactccatttttctgagagattccccagagcgtatcacccttttgcaccgtaatttcttttgcagaagcgtgagctccgaatgcagttgttgaaagtgcagcaactgccacaaaggacataatcgtcttcttcataagtaaatcctcccttgttagctttttattggcggctaacaggtgatatcgtaacacacgtaaatgtcaaatcaataacaaaaagatatgatttagattacagttcctttacatgaaggatttctctctgatggaaagacttgctgaacccttgatataataggcttcgcaggtctttttattttgaggcgaaacagagaaaataaaatgtgttttttatagaaaaaaagattgtttttctgtttttttagtctgtcatccttgcataagcttgtatttcttgtaaaaaaagccggccgtattttgctcttttttgttctccgactccttttatagacaaaagttcatcatcatttacgggctgttttcctgacatttcttttaacgtttggtcagagaaaacaacaaatggcggaacaccctgctcagccgcaatttctttccgaaccatgcgcaatcgttcaaacagctcgtcattttcagtaatcgaggccgcttttagcgcttcttttctcgttactgataattctcctctcagcacattccttcctttactgctgacaaaaagagtcggaaacgttccgtctgacatcctgatgaaatcgtcagaaataagaaattcgataaaatcactgatttcccctacggattgatgttttaatatcccatatgttgagagatcggcaaagccgttttcaagaacttttttatttttagatccggcgagcacttgggcaaccatcatcttaccaaagcgttccttcatgcgaatcatacacgataagaccatttgcgcctcccgtgtcacgtcatgagccatccttgtatcagtgcagtttccgcactgtccgcacgcatcaggctccttttctccgaagtacataaggataaaacgctgcagacagtcttccgtgtgacaatagtcgaccatttgcctcagcttttttaaatcctgcttttgtttctcttcatgttctgattgttcaattaaaaaacgctgcactataatatcctgcggtgaaaacaggagaacgcactcgctgtcaagaccgtcccgtccagcccgtccggcctcttgatagtagctttccatatctttcggaatttgtgcatgcagaacaaatctgatatttgatttatcaatgcccattccgaaagcagaggttgccaccatcacttgcagctcatcattaagaaacctttcctgctgctcttttctcacatcatcagccaagcctccgtgataccgccctgcattgacccgatttctttttaatcgctcataaatccggtcagcttcttttctggtcgctgtatagataatgccagcttcatgtttgttgttttgaacatactcgtcaataaaacgatccttattttctccctttgctactttaaaggttaaattgtctcgggaaaatccggtatatacggtgttttctttttgtatgtgcagctgtttgcagatatcctcgtgtacctcaggggttgctgttgctgttaatgccatgatgacaggattgtcatgtaattcacggaataaaatttcaatatttctgtagcttggcctgaaatcatggccccattgagaaatacagtgcgcctcgtctattgcaaccaaagggacatcaatgccctgcaaaatccgaataaactccggtgacgttaatcgctccggtgtaatgtaaaatagcttataggccccttctttaagcccagtcagcctttcatatatttcctgactcgattgtgtgctgttaatgtacgcggccttaatccccgcttcttctaacgcatcgacttgatccttcatcaaggaaatcaacggcgaaataacgatcgtagtcccttcaaacatgagtgccggaatttgatagcaaattgatttgcctcctcccgtcggcataatgcagacggtatttcgtctttcttccgtcaccgagcggatcgcttcttcttggccattgcggagcttttcataaccgaaataatgggccagaagggattgggctctatgtaacataacgtataaacctcgcttttccttgaatttcttccatcatatcataaaaaaacggtcttcatttcttccacacagaaattgaatttttgctataccaaacctttttaaataaaataaaaagccatttcccaaaaggaaatggctttcgctacgtcttgccgtatgcaagtaagaaagttttaaaccaccactcctcaaagtgggtgtttgcagaaacgttcctgtcgtcctctgcaatggaggcatgacattccggcttcgatataaaactccctattacagcttaaaggttaaaacttaattaacaatacgcacaaagtagcttcttttatatagtacaccatcagcagctttttatcaagagaccagaacaattgtttagaaaaactttttccagccgataaaaacgatttttcgctattatatccggagattcgacaagtcaaaaatatattacaataaaaaaacagccttttttcgcaaagaggattcatcactttcttctattataatatgtatacaaaaaaactcctatcgcccaatgataggagtctttgtttcattagaattttgcagcaagatcttttgcttcttgtaaacctttttcaatgatttcttgcgcttgatcaggtgctgcgttatgtccttcgatgacaactgtgtgcaagtcttgaacaccccagaaaccaagaactgttttcatgaagtttaatgacatttcaagtgcagccattggtccttctgagtagacaccgccgcgagcgttaagaagcgcaacttttttgcctcccattaaaccgactggtccttcttgtgtgtatttgaatgtaacgcctgcgcgagacagataatcaacataagtatgaagcactgctggcactgtgaagttccaaagcgggaatgcgaaaacaactttgtcagcttttacaaactggttcagatatttgtcagcaattgctgcttgttttttctcatcttctgtcatttccattccttgacctgctttaaatgttccgttaatcatatctctgccaaggtaaggaaggttttccttatgaagatctaattcaaccacttcatcattagggttgttttctttataagcagctaagaaagcttcgtaaagtttagttgaaacgccttcttcagctgtacggtcgcttgattttacaaataaaactgtagacatttgtattcctcccggtaaactttttatatttacttacaaatagtatgttactttcttttttacgtaaagtcaatcactttattttgaatatgagattttttttcaaaaaaaagcaagtacatctaatatcggtgtacttgcttgccatttttacttcgaatcttgttcacgatccaagatttcatacgtctgcgagcttttttgatcaattgtttctttgttggataagtcttttacctgttcatgaaactctctttcataagaaggagcatctgtctccagatcatcctccacattagcttgagcctcaactgtcattcttgcatagggaacagcttcaagtctttcgtaaggaatgtcttggccggttttttcacacacaccgtaagttccgtctttcatcttttgtaatgcacggttgacctcctctaacagctcccggtcaatctctttcactgtttggtctgtcatccggtctgtgacgagcgtcccgtggtctgccatatggttgtcaaccccgttggaaagctcccccacttcttccgtcattgattctgtttcctttttctcgccagacaattctttttgcatatcgagcaatttatgatagagatgctgtgtttgttcttttgtcagtgccatgtatatcctctcctttctatcctgtttcccgttttgccttctgtcaaacatggaaacatcgatggaaagaagctactgcctttttgaacggatcgtgaccgctggcgtcgatggtgcttcgggttttcgttggcactttttgtccttctcttctggcggtatataataggttgcgcctatatttaatctgccgctcagttcatcaatggtcagctcgccgaattcaagatgatagtcaattttttcgacattcagcgtttcaatatgtatataggtttcttcagactcctgtttgctgctttgtttttgtttctcaatcactgagagtctttcttcacattcacgcagtttgtcaagttctggtttcaagcaaagcctgatcagcgaccggaacatttttttcatgacatcacgaccctttgcatactcctctttcgtctacatatataatgaggtatataccatagaaaggagaggttttcatgcttccgactaacatcaatatttctcatctcaagactaactcgataggcaccggctcatcccttacctttggttctgcggagttaaggaacaggtgctctgctatcaaaagaaataacggttttggggaacaaaatgcagatgttattgttatggtcattccgattgaatcaattgatgaccgtgatggagcagatgcactcagtatgaaaatcaatcatcaataacaatggttttcgcttgaccttcgtctttttgaatagtgatgtataggattccgtctttaaaaatggcattcatctttccatgaagatgatcggaaagctgaattttcttctcaaaacttccgtatttcccttctttttggcgaaagtcctgttcattaaaataggaaaagcgctgccccttcaccactaaataatctccgtacgataatatgtgaacgtcttgtttacggtagcctggaagataaattaaaaactgcacttccgcaacggtatctacaatatccatgctcggaaatgaagcatctcctttccctcgctgatcttgctgcgcaaacggaaacggagattggccatttgtcataaaaggggttttttggtcttcatcaaatacctgtttccaaaagtcaccgccgtacatctgctgtgcgaattccatccactgcttcatcttttcgaaatccatttgaagccccctgtcttaacatactttataaccgccagcatacaactatagaaaggaggtttgcctgtggttcaaccaactccgtatatcaatattaatattttcatgctgaaaattaattcctttgaaaatgcttcagcggttaacgtaggacaaaatttattggcagaatggcaaaattcagataaaaaaaatcaaggctacggacagaattttggagatgcgagcggatttatgggcacgagaagccatgtggatgacagagaccaaattgattctccggcctcttttgaaagtgaagcggttaactcctcaatcaaaaggaagtgatgagatgttcttttcaccctccgtcgtgaatgtcggcggatttaaaatcaatacgatggatcgaggttcctctttaacactcggtccgtatcagcaggtcgattactttttatcagctaaaataaatcaagggtttggagaagaaaatggcgactttactcctcttgtcgtaccgatttcaaatgtattagatgcagatcttgttgattcgaactcagcgaaaaacagtgtggtgtaataagaacagggcgcacatgccctgttttttttataaaaaaaagcctaaccattttttgaacggctggctcatcaaatattcagctgcacaaatgctttgtcagcaccgcctgaacctcgcttaaatcggtgtctttcgcaaattctaattcgaacgttttgcttcttgtcatcaataaaagcccagtgtccggatcaaacattcccgcttcttgaatggcaaagctttcaattgttttatatggaagaaatacacgaaccttctttttggaaaacattttattgtcaaagaaaatgatccgcttatttgtaaagcaaatttggtccactcggagcttataaatcgattctattctttccccttcaacgagcaaagcctcaagcttctttgcgtccgttgatctgctaacagaaaaaatacccaatgaagaacccctctttctgcatttatctatttgttttatcattcactacataaaaataagtcctttatccctatataagaatacgacatagaagacatttaaaccattacgaacagattacatttttcaaatttttgatttgttttttggcttttaagctgttgtcatcaagtaatacgcacatatagagaaaaaagtttcaatattcagcaatgtttttataaaaaagcggtttttaatgatttttttaattttgttttatatttcctgttttaaccacaaaaaaaccgcagctgagctgcggttttatgtatcgactgcttttaacaaaatctgtttgatgcttcaaggaagcattacatctcttcgaagtattctttataatagccgccgactttattcgtattgtcgaccacaaagagaaactcctctgtttcattttttacttcatattcttttcccggcgttaaaacgcggtttacgatatatttttttgcgtttgtctgcacacactttacttttttaattgtttctttttcaagccaatttttatgaatcatgatgaaatctccttttcttatctataagcttattgtagcttttttcttttgtaaattgcaatatcggttattcattgattttgccttgatttctattatagaatgtttgtatacgcttacgtttgaagcaactatcacagcttatttctgctattcaatccaggaatcaatgtgctatcaccaagaatctcagaacagaccataaaaaatgactggaggtttgttacggatgagttctttaacgatgcaagtgacgaaaaggctggagacatttttacagggaacaaagaagctttatattgacggaaagtttgttccgagtgcctcaggggcaacctttgacactccaaacccggcgaccggcgaaaccttgatgacgctgtatgaagcccaggctgcggatgtggacaaagcggttaaagctgcccggaaagcctttgaccaaggtgaatggagaacaatgtctccagcttcgagaagcagactgatgtataagctggcagacttaatggaagagcataaaactgagcttgctcagcttgaaacacttgataatgggaaaccgatcaatgagacgactaatggagatattccgctggctattgagcatatgcgctattacgccggctggtgtacaaaaataacaggacagacgattccggtttccggcgcttattttaattatacgcgtcatgagcctgtcggtgtcgtcggccagatcattccatggaatttcccgctcctgatggcgatgtggaaaatgggcgcggcacttgcaacaggctgtacaatcgtcctcaaaccggctgaacaaacaccgctttcagctctttatttggcagaattaattgaccaagccggtttccctgccggtgtaatcaacatcatcccaggattcggtgaagatgcgggagaagcgctgacgaaccacgaagcggttgataaaattgcctttaccggttccactgaaatcggaaagaaaatcatgtccaccgcagcgaaaagcattaagcgtgtgacattggagctgggcggaaaatcgcctaatattcttctgccggatgcgaatttgaaaaaagccatcccgggcgctttaaacggtgtgatgtttaaccagggtcaagtctgctgtgcgggctcacgtgtcttcattcataaagaccaatatgatgaagtggttgatgaaatggcgtcctatgctgagtcactccgccaaggagcgggacttcataaagatactcaaatcgggcctctcgtaagcaaggaacagcatgagcgcgttctttcctatattcaaaaaggaaaagatgaaggagcaaaagcagtgaccggcggaagctgtccttttgaagcaggatattttgtcgcaccgactgtgtttgcgaatgttgaagacgaaatgaccatcgcaaaagaagaaattttcggacccgtgctgactgcaattccgtacgaaacagtcgatgaagttattgaacgggcaaaccattcagaatatgggcttgcagccggactatggacagagaacgtcaagcaggctcactatatcgcggaccgacttcaagccggaaccgtttgggtcaactgctataatgtgtttgacgcggcgtctccatttggcggttataaacagtcaggactcggacgagaaatgggatcatatgccttggataattacacagaagtcaaaagtgtatggataaaccttgaagactaacatgtatatttaaaaaactgctgcctgccagcagtttttttctttctgtaatggcggtaaaagacgctgaatatatatgcttctgaaggagttgagcgtgatgggcacacttcaggagaaagtgaggcgttttcaaaagaaaaccattacggagttaagagacaggcaaaatgctgatggttcatggacattttgctttgaaggaccaatcatgacaaattccttttttattttgctccttacctcactagatgaaggcgaaaacgaaaaagaactgatatcagcccttgcagccggcattcatgcaaaacagcagcccgacggcacatttatcaactatcccgatgaaacgcgcggaaatctaacggctaccgtccaaggatatgtcgggatgctggcttcaggatgttttcacagatctgagccgcacatgaagaaagctgaacaatttatcatctcacatggcggtttgagacatgttcattttatgacaaaatggatgcttgccgcgaacgggctttatccttggcctgctttgtatttaccattatcactcatggcgctccccccaacattgccgattcatttctatcagttcagctcatatgcccgtattcattttgctcctatggctgtaacactcaatcagcgatttgtccttattaaccgcaatatttcatctcttcaccatctcgatccgcacatgacaaaaaatcctttcacttggcttcggtctgatgctttcgaagaaagagatctcacgtctattttgtcacattggaaacgcgtttttcatgcaccatttgcttttcagcagctgggcctacagacagctaaaacgtatatgctggaccggattgaaaaagacggaacattatacagctatgcgagcgcaaccatatatatggtttacagccttctgtcacttggtgtgtcacgctattctcctgttatcaggagggcgattaccggcattaaatcactggtgactaaatgcaacgggattccttatctggaaaactctacttcaactgtttgggatacagctctaatcagctatgcccttcaaaaaaatggtgtgaccgaaatggatggctctgttacaaaagcagccgactttttgctagaacgccagcataccaaaatagcagattggtctgtcaaaaatccaaattcagttcctggcggctgggggttttcaaacattaatacaaataaccctgactgtgacgacactgcagccgttttaaaggcgattccccgcaatcattctcctgcagcatgggagcgaggggtatcttggcttttatcgatgcaaaacaatgacggcggattttctgctttcgaaaaaaatgtgaaccatccactgatccgccttctgccgcttgaatccgccgaggacgctgcagttgacccttcaaccgccgacctcaccggacgtgtactgcactttttaggcgagaaagttggcttcacagaaaaacatcaacatattcgacgcgcagtgaagtggcttttcgaacatcaggaacaaaatgggtcttggtacggcagatggggtgtttgctacatttacggcacttgggctgctcttactggtatgcatgcatgcggggttgaccgaaagcatcccggtatacaaaaggctctgcgttggctcaaatccatacaaaatgatgacggaagctggggagaatcctgcaaaagcgccgaaatcaaaacatatgtaccgcttcatagaggaaccattgtacaaacggcctgggctttagacgctttgctcacatatgaaaattccgaacacccgtcagttgtgaaaggcttgcaataccttaccgacagcagttcgcatagcgccgatagcctcgcgtatccagcagggatcggattgccgaagcaattttatattcgctatcacagttatccatatgtattctctttgctggctgtcggaaagtatttagattctattgaaaaggagacagcaaatgaaacgtgaatcttatcaaacggaaatgttcaattggtgtgaagccctaaaagatcagattcaaaagcgaggtcagcttgaccagtttgaagatcaaatcgacaagatgattgaggctctggaagatgaccaaacaacagaagaagattggtataaacaggccgctgccctttatcgggatattacagaatcagatgatacaagtgaaagacgcgcttatgtccctatagggaaacacgtgctgccaaagcttccttacaaatactccgccttagaaccttatatttcacgcgatattatggtccttcatcatacaaaacatcatcaaagctatgtcgatggcctgaacaaagcagaatcagagcttaaaaaagcgagagcaacaaagaattatgacttaatcactcattgggaaagagagcttgcgttccatggagcaggccattatttgcacagtattttttggttttctatgcatccaaacggaaagcggcgtcctacaggagcattgttccaaatgatagacctttcatttggaagctattccgcttttaaagaacattttacccaagccgctaaaaaagtggaaggcgtcggctgggccattctggtctgggcacctcgatcaggacggctggagattttaacggcagaaaaacaccagctcttcagccaatgggatgtaattccccttttaccgcttgacgtatgggagcatgcctactatttgcaatataaaaatgaccgggccagctatgtagaccactggtggaatgtcgtggattggcgcgaggcagaaaaacgttttgagcaggcaaaagaagtcgtttggaagctctattaaaaaaagccccctttccccgggggcttcgtgttttaaaaaatccctaccacatgcaaaaacacgatgatgatggcaacaggagatagatatcgaatgagcagcagccaaaccgcaaaccactttcgtttgagattggaaccgcttttcagctcgtcaaacaaatcctgtttcggtatttttagcggtacaaaaatcgaaatcagtaacgcacctaacggcattaaaatattgctcacaagatagtcggccgcatcaaaaatagacagatgaaatatagagacgtcacttaagacaccgtatgacaatgcagacggcacaccgacaataaaaatagcaattccgcctaaccaagcgaatcgttttctcttattgacatcgcctttcgaaagtactgcgaccaaaatttccagcattgaaaaagcagatgtcaatgcagcaaataaaaatagaagtaaaaatgctaataaaaagataattccgaacggcatttgattaaacacagtcggcagcacgttaaataacagaaccgggccttggtctggtttgaggccgaatgaaaagacagctggaaaaatcgcaattccggccattacagcaacaagcatgttcataacagttacagatacagcggactgtaccagattttcctgtttctctaaataagcgctatacgttaccatgacagatacaccgacacttaataagaaaaaggattgtcccattgcatataaaatggtattggcatcaattgcagttaaatcaggcatcaggaaaaatttgattccttccatcgcgccatcaagtgtaaccgagcgcaccattaaaatgatgaataatagaaaaagcgccggcattaatacttggcttgctttttcaattccgctgcttaccccttttgcaacaactaaaattgttaccaccataaagagcagctggcctcctacagccaaataaggatttgaaatggtacttgcaaatatcgtatcaaaaccagatgtctgcgataaaccgccagtgaagccttttataatataaattaaaatccatccgccgacgacactgtagaaagatagaagaataaagcatgtcaccatgcctaaataaccgatccaatgccacttcgttcctggagcaagtgttttataggactgaacggcatctttctgtgttcttctgcctatgatgaattcacctaacaataaaggcagtccgattaaaaccgtaaataaaataaaaataagtaaaaatgcgcctcctccgctggttccggcgacatatgggaatttccatatcgcaccaagcccgatagctgatcctgccgcggctaaaataaagccgagcttcgaagaccattgatttgcttccttcaccgtatcactcctatttgatctaaccattataaaagttcattgtaagaatatcttcctatatagtcaagaacattttgattagtttacatcttatatctatatacatctgccaaaaactaatattgaattattcagaaaattatttataataagagaatgttatgaaatttgtaagaatttctgctgaagttcttgataagtgtgttaggagtgtttttatggacatcattagaaaaataagtcatttcgcaggacaaacctttggcatatgggtcattgtttttgcagtgctgggattttctttcccatctttatttacgtggatcagttcttatattacgatttttcttggcattatcatgtttgggatgggccttacactgcaagccgatgatttcaaagagctggtcagaaagccttggcaagttattattggagtaatagctcagtatacgatcatgccgctcgttgctttcggcctcgcatttgggcttcatcttccagctgaaatcgcagttggtgttattcttgtcggctgctgtcccgggggaactgcatctaatgttatgacattcttagcaaaaggaaatactgccctttctgttgcggttacgacaatttctaccttattggcacctgttgtaacaccgttgttgattatgctgtttgccaaagaatggcttcctgtctcgccggggtctttgtttatctcaattttacaggcggttttatttccgatcattgcaggtctgattgtcaaaatgtttttcagaaaacaagtggcaaaagccgtacatgcccttccgcttgtttctgtcattggcatcgttgcgattgtctcagctgtcgtcagcggcaatcgggaaaatctgcttcaatcggggttgctcattttttcagttgttatcctgcataacggtatcggttatttacttgggtttttttgtgcaaagcttttaaaaatggattacccgtctcaaaaagcgattgcaatcgaagtcggcatgcaaaactccgggcttggggctgcacttgccacggctcatttctcaccgctatcggccgtaccaagcgcaatattcagtgtgtggcataacctttcaggttctatgcttgcaacatattggtcaaaaaaagtgaaaaagaaacaagctggatccaaaagcagcaatctatcactttaaatatgcatcaaaaaaggtacatcactttatcgtgatgtacccttttttattatccttctaataaaagctgttcaggatcttccagtaaatttttgattgtcacgaggaagccaaccgcttctttaccgtctacaatccggtgatcataagataaagcgagatacatcatcggacggttttcgaaacgctcttcatcaattgctactgggcgcagctgaatcttatgcatgcccagtataccgacttgagggctgtttaagatcggagttgacatcagtgaaccgaaagtccctccattggtaatcgtgaaggaacctccctgaagctcgctaagggttaatttattgtttcttgcttttttcgcaagctcgccgatctctttttcgattcctgcaaatgtcaggcggtccgcatctcgtactaccggtacgacaaggccttcatcagcagcaacagcgataccgatatcatagaatttcttaacgatcaactcatcgccctgaatttccgcattcaacagcggatattttttcaatgcagccacgaccgctttcgtgaagaaagacataaagccgagcttcacttcgttttgctcaaagaattgatctttgcggcgttttctgagattcataacagccgtcatgtccacttcattaaatgtagtcagcatcgccgatgtttgctgcacctctacaaggcgttttgcaatcgtttgtctgcggcgtgacattttttgcacttcgacaggtttatcaaagctttgctgtgcttttggagcctgaggctgctgcttttgctgaggagccggttttgatgccggtttttcgtacgcttcgacatcctgcttgcgcactcttccaagcggatctccagttggaacttgagacaggtcaattcctttttctctcgccagcttacgggccgacggagaagcgatcgttcttgattttgcttcagattgtgcttcctcgctcacctcttgtgcagctggttcagcctgtttctcttctttcacgctttccttgctttctgctttctctgtaggagcaggggcagaactttcacccgcgccttctgaaatcgtaccgataatttctccgacctggacggtatcacccgaatctttcaatacctcttgaagtacacccgattcttctgctgtcaattcaacattcactttatccgtttctagttcaagcagatattcaccctgttctacatagtcaccaggctgctttaaccattgggctattgttccttctgagattgattctgctaattcaggtaccttaatttccgccattttttcatttcccccttagtttttgcgagtcaagctatcagatacaatacgttcctgttcttttttatgaactgtcggatctccctctgcagggctggatcgtcttcttcgtccaatatattgaacgcttactccctctggtgcaatctctgtcaaatacgggctgatataaccccaagcccccatgttctgcggctcttcctgcacccaaacgatttctttcaggttcggaagttttgcaaataactctttgactccttttgccgggaatggatacaactgttcaattctcgcaatgtgaagccactctttaccgtcttctaacttattaaaatgatcactgatgtctatagacactttaccgctggataatacaagtctggttactttttcatagtcatgagaaagtcccgactgttcataaacaggctggaagcggctttcgctgagctcctgcacttccgacaccgtatttgggttgcgaagaaggctcttcggcgtcataatgacgagcggtctgatttcttcacgaagcagcattttagcctgtcttcttaaaatatggaaatactgtgccgcgcttgtcaggttggcaaccgtccagttgttttctgctgcaagctgcaggaatcgctcgattcttccgcttgagtgctcaggcccctgtccctcgtagccgtgcggaagcagcatgactaatccggatttttggccccatttcgcgcgtccggcagaaataaattggtcaaaatacacttgagcagcgttggcaaaatctccgtactgcgcttcccacaaaacaagcgtttccggtgaatgcacgttatagccgtattcaaaaccgagaaccgatccttcagacagagggctgttatgaacagcaaatgatgtgctgcagtcagataagtgatgaagcggcacaaattcttcgcccgtctcactgtcatgaagcacaaggtttctttgggcgaacgttccgcgctcggaatcctgtcctgttaaacgaatcggtgttccgtctttcaaaattgaagcaaacgcgagtgattctgccaaagaccattccacttttctgtcatcatcgaacgccttggcgcgtctttctaaaatgcgctttagcttgccgaaaacattaaatgactccggccagttgatcaattcgccattcagcttgcggagcacatcaaaatcaatcgaagtgtccacatctgggaaaccgtttgatacaggctctggaagttcaatttcacaggcagtgtgttcctttttagacggaactttctgatatgcatcttcaatgcgcttcgttaccgatttttcgatgttttgaacgacttcctcggtaagtacgccttcttttaccagcttttcagcgaaaatttgtttgacggtcggatgctttctgacagcatcatacaacattggctgagtggttgacggttcatccatttcgttgtgtccatagcgtctgtacccgatcaaatcaatcagaaaatccttgttgaatgtttttcggtattcgaccgcaaacttaacagctgaaagacaagcttcaggatcgtccgcattcacgtgaacaatcggaatttcataacccttggccaggtcgctggcatattttgtcgatctggattcagcgctttctgttgtaaatccgatcatgttattggcgataatatgaatcgcaccgcctacttgatacccttttaaagaacttaaattcaatgtttcagctacaattccttccccagggaatgcagcgtctccatggattaaaatggccagcgattttgtttcatcttgtaccgggtatccgctttgtgttcgcgtttcctgtgccgctcttgtgctgccttcaacaatcggattgataaattccaagtggctcgggttgttcgctaacgtaatgcgcgctgattttgtttcagcgtcttgaagctcccgattcgcccccaaatggtatttgacatcccctgtccatccgtagctgattccaattgatccctcagacgggacaagatctttattcggcgcatgctggaattcagagaagatgatttcatacggtttgccgagcacatgtgccaagacattcaggcgtcccctgtgcgccatcccgatgttgacacttgtcgtgcctgatttgacagattgtgcaataatgtcatcaagcactggaacaagagcgtccagaccctcaatggaaaagcgcttctgcccgacgaatgtgcggtgcaaaaactgctcgaagccctctacttcagtcagtctttccagcacagccgacagcttttcagctgagttcttctggaacagctcgccagattcaatctttcttgtcagccactcgcgctctttgaagtcatgcacatggtcaaattcaaaagagatggttcttttatacgtatttcgtaaatactgaatggcttctaaaccgttcgtaatgtttttaggagcgtctttgcagatgacagacgcaggtattgcttttatttcctcttctgttagcccgtaatcggataatggaaaaagttcgctctttttctcatcctttctgagcggattgacggaagcgttcaaatggccataggttcgaatatcttctgcaagtctgactgcggatgcgatcttttgaatcagatcggctgtaacacgtcccttttcttttgttcccgaggcctcttttatatcgcttggcggagcaccgagctcgtcgaacatttccttcaaatccgggtcaatgctgttcggatcctgggtatactgatcgtaaagctccagcgcatagccgaggttcggaccgtaaaaatcttcccaattcattcgttgtttcatactattttgaaacatttgaatattacccccaacttaaataatcaagtgatcgattcactatcttgaaataactttcgaacgctgtgtccaaaattatgtaataaaaacgcttccaacgatattttaccactgtttgcaatttgattctaccttgattgttcacaaaatagtaaaaaacctttataaaaaacaaaaaatttaatcattcgaaaaaacaaacgccaaaaagcataggattaagggctatcctatgcttttatgaagcagttttttcagcagcggatacaaaacatccggtagctgatcaacatccgggacaaatatactgaattttccgtacatatcctgaatcgtcttcatttgcgattcttctatttctgagttggagagaaaaacatttatcacttctattcctctttttcgggcttcgataaccgcctcacttgtatcgacgatcccattttgttcgtagccaaatgcggccggctctccatctgagaaaacaattaagaacttttgcgcctcgctgcgatgcagcatttttttcgtcatctgcctaattgcgtacccgtcacggttatcttcttctggctcaagctgcataatggccggtccagaatcttgtcttaatgatgattggaagggaataaccgtattgaaatagtttggttggcttgtttcggttgcatcatttgtgtcctcccagaaaccgacaatctgatgcggaaccgctaccgatttcaacgcttcgtgaaacagcacgattcctcgttttgtttcgtccattttgtcgaacatgctggcggaacaatcgaccagcaatgtaaaaactgcgtcgatttctgtagacggttcttgctttttgtagaacaggcgcggatttcgctcagtgaagtaacgaagaagcttattattcagtctcccggcatgaagatctgttctcggcaatgtttttttatgctccagcgttttttgaatcatttgtttcaaacgcttttgatacgattcaatcgtttttgcctgctgtttataagaaagctcctcttcactagttgccggctgcggttctttataaattggaaatgcatatttattttctttgccgtcagccatacccgctccgttcggctggtctttttgagactccagcgcttccagcttggaatagtctttccgtttcgtatgtctggctgatccttgaacagagccaagggcctgatctccatcgtcgccttcccttgaagcatcttttcctaaatctgattttgcgccgtgttcaatatcaaattgaaggaagcttttagacggtgcttctgtttcccggtgccatgtcggcatttcttcttcatggatatcctcatcaccgtctgatttttttggaagcgtgatgtcatcactcagcttcggcgcttttttctcttcttcaaataacggctgttctgcagcttttgcgtagtcaagctcaggcaaaaagaagtaggtgttcaacatgtctttatcgagcacctcttcaagtccgtccatgaggtcctcaacaattttcagaacctgccgtgtcgaatctacttcatacacacgcaagagctgctgctcaataaacgggcgcatcagatcgatatcttcacgcatggatggaagggtctcgagcggcgattccgctgtgagcttgacatagatcgcgcaaaagagcgcatcggtaaaaatgcttcgttccaaatttaaggtcagctgggttgagaaatgttttctgtacatgtcttttcgcttcgcaaatacatgtttcgtacccggacgctcacgtttgatgcattcttcgatcctaatgtcttcaagcagcataaagagctgcttggcaaaacttttaaaggtgagatgacgatggatatcattcaaaaagttcgcaaactcatgcagcgagctatatcttgttccgactgaacgcaggtagacgtcgcttttcagacccgcttccatgtcctcagctgccctgtctttccaaaagtggctcatatagattttcttttcaaatggattgtaataggactgaacgccatactccacttctaccgcttcactcttggtgagtgttttggccaaatcagtcagcatcataaataaaaatgaatcaatcgtgctgtcgttaaatttgataaatttcatcgcagccccctcattcaaacagagtttctgcaatatttcggacggccgctttttcccgatcatcatcaagcttttctacaattccccgctcaatggcacgacgcggcggaatataagcagctaaatcacatgtatcgattaaagctctgatggatgccgcttcttcagacacctgtccgttattggcctgaacgatcaagtcagaggaaagcgtgataaatctgtcaatcaatttctcgtctttcaaggctgactgagacatgagcacttgtttcagcagctcgcctttaatataaggcacatcaatgatgacaaaacggtttttcaacgcttcattcagaggaacagttccgacatagccttcattgatggctgcaatgactccgaaaccgcttttagcccgtatgacctcgcctgtaaacggatttgtcatcatttttctgtaatctaatacaccgtttaaaataggcagtgtttccggcttcgccatattgatttcatctatataaagaaaatggccttccttcattgcctttgtaacaggtcctgaaacaaactcgattgtcgcctggccagattgattttcaatcgttttataaccgaccaatgcctcagcatccaagtcgactgaacagttgacgctgtgcatcggtttatgaaaatagctggacaatgtttctgccaactttgtttttcctgaacctgtaggccctttcagcaggacattttttcccatggctaatgcaataatggcgtcaaatagaatggcttcatcctccgcctcatagcctgatgttcctataagcgattgaaactccggggaaataggctgctctttatatgataaaagcttttgttgtatatcttccggcaatgttaagtgctgtagttgtgttgtcatagacagattccctttcctattcatattccttaacgagtatactaaaaaagcccctgtatgctcaatacaaaagggcttggatgatattactgcttctcgttatttcccaaaagggctccgcagacaatacgcgcaccggaattgccgcttgggtttgtcagataatcgtccgcttgttcatgaataataaatgcacttccgtcctcgtcgagaatatttagtttacttccttttttcagtgaagtgtcaggcgcattcattatgacatctacctttccatcagcaccgacttcaaggttcggcagatctccggcatgatgccccatcggattattgaagccgtgttctttgttcagtggattaaagggaccgcccgctgattcaaaatccggcctgacacaagaacctttctcataaatatgaaaaccgagagaagcacctggacgcaggctgtttgcggaaatatgaatatcgaggccttcatcatctgattctttgatctctataaagccgactgctttcccttcacgattgaccaactggacatgatgaccaaacgctgacgtttcaaccacttttttttccggcacccggttaggagggtctggaggttttttttgtccgcatccggcaactcccagtgccgtcagcatcatcaacagcaagagacggtacatactgtctcccccttgttttttctaacagtgtggtcaatcattgtctggtataaacaaaaaagcctataaaaggctttttgtcatactcatttttaaaaataacttcttgcgcccaagtaccgctgtttccaatacgaattgctgagattggaaatgtcgacgcccgatgagcttgcatgaataaaatcaccgccgcctagataaatccccatgtgagacgggccggatttatatgtggtaaagaagacaaagtctcctactgacggctggctgactttctgcatgacattccaataccctgccgtactcaatcttgatatagatgatacattattaatgaggtaataaatgaagccgctgcaatcaaaaccggcaggcgtgtttccgccccatcggtaaggcactccgacatattttttcgcttccgttatcattctgtcaatcttcgagcctatttgaatgtttgaccctgagttatcttttggctttgttggctttgtcggatttgaaggattagattttgatgctcccgaaatagtcagaacctgcccgatttgcaacacatccgatgataaattgtttttatcacggatgctttggacagtgactccgagccgatttgcaattttccacagcgaatcgcctgcttttaccttgtacgtcgttgtttttgagggattggagtttgacggcttttttgaaccgctgtttccgctcttcggtgagctgcttccttttattttgagcacctgtttagggtaaagtgtatctgatgttaagccatttaaggtttttaattcagctacagtcatatttaagctgtttgcgattttccacagtgagtcaccaagcttgaccgtatatgtactttttgaagaacctgaagaattggaaccgctgtttttctttgatccatttgatccgcttgaactgcttgtccctttgatcttaagcttttgccccggacgaatcaggtcactgctcaggctgtttaagcttttaagctcagaaacactcattttatgatttttagcaatcatccatagggaatcaccatatgcaactgtgtatgttgatgttttgcttgaattagatggggatgtcgtgctttttttgctgctttcaggaaccttaagactttgtccgacataaagcaccgttgatttcaatttgttttcggatttcagagctgatattgtcgtatcatactggcgggaaagtttccaaagagagtcaccgctttttacttttatcgtttttgcttccgcgggtgctgcggccatcgacgacccaacaactgcagaaacagccaagccggctacaatcttctttttcattcattcaacctcctaaactgttttttgcaaaaacagctagtattttgtttccaaaaatggcacgcaactgttttatcgtcaatttttcagcaagttaaacccttttcaaacatttggcagcattttcagcatcgttcgacctttaaaccttcaaataaacatctaacattttacataagcacgatatgtttttcgaaagtctaaggaactatttaagcgagggtaaaaatgatggttttctattgatgaacgaagcagtttctcctcctttcttgtctatttttctaatcaattctctatcggcgtgtcaaatccctcttatgaaatggcaaaaagcctgttctttcgataagaacaggcttttacactatgcatttgctgattgagttttttgttttacagcttcaagaatgctatcggccgcttttttagagccgcctgccgctttcagtgattgtccaatttcttttgccttttcagcatacgaaccattattcattacatcttgtatcgtctctttcagaaggctttcagataattcttctttttttaacacttttcctgcgccgactttttccacctgatctgcgacaacaaattggtcgcctcccatcggaatgacaacgagcggggtttcaaaatacaaaccttcacttgtgctgttcattccgccgtgtgtcacaaataagctggctcttttcaagatctcaagctgagggacatacgggcgtacaatgaaattctccggaatgtcgtttaactcacttgttttaatatgcttgccgatggaaagcacaactttaccgtcaaagtccttacacacttcaaggcattgattaaaaaactgcttttgattattaaaaatggttcccattgaaataaacagcacgttttcattgtcaatctgatcaaatgggaaatcattgtttccggctctttctgtaatggaaggaccgacaaatacatatcgctcgccaaattgctcagccagtggctgaaatccccttgatgtaaagacgattgtcaagtcaccatcagctaaaaaaacatcaaatggcttcttgatctctgcttgaaaatcagcatttaacgtttctgcaagctgctggtatgattcataatgaggcgaatcttcaagtgatcctttcatgtacgctcccatcatttccttcgcaaattcctcattcatcgcaaaggttgtacacaatgaaaatcttggcagcttcagcatgttggcaatgactttacccgcgagaagatggtgatcatatatgacataatcatacgattcatgtttgacttcctcataaatatgagtcgcgatatccttacaggctttcaaaaaagcgcagagcatttctgtgaaatctctttcttcatcgccggttgcgtttttcccgaagtaatctcctctgaaatcatgatactcacgaaactctatatcaagagctgtgattttttctttatattccttcactgcgtagtacgtaatgttttctccccgggatttcagctccttcatcacaccgatagagggattaatatgcccttcaccgggaaaaccgatcattaatacattagccatgcgacagcacccttcctttgaaaatttatgtaatattttatacggtactataaatacataaacaggtaaagtatttcacttaattaatattcattacatataacttttctaccagtttatatttcctgtcttcaagacaaaaagcattcagcttgaagcgaatgctttaataaagatacgaattcagtcattttgtctcatgataggattcttaatcaggccctttttattatttttacgttcttggtgaaattaacggatataatacaccgtctttggcaaacgacatcttccctgtttcctctgaaaccacgagcaccagtgcatccgtatagcccgacataccgagagccgcccggtgccgggttcccaaatggatatccacttccttcgtcgtcagcgggagcacattggctgctgacacgagtttgttttccctcactaacaaagcgccgtcatgaagagggtttccggggaaaaagatgctttcaattaatgaagagctgatctcggcgtgtagggaggtgcctttttgaataaaatgttcaaccgggtccgctctttcaatcacaattaaagctccatgcttatgttccgataaggctttaatcgccttggccagctcaataaatgccggcgtaaattcctcaatgtatgattgcaaataaaaggaggatgcaatcccctgcatgtcctgaaatatgtgccccaaatcatctaattcacaaaggagacactggtctttttcgtgaagcgttttcaagattagagatgcatcacctaatatttgctctaggtacacctgtattttccccttgaacgcattttctgatatctgctcatagcgcataatcttcatctcctgttcaaatttccaacttttcacgaatgcttatcttattgatgcacattctattggtaaaggagggatgtaaagaatggaaatcgaaagaatcattcagtatatttgcacctttttaggcgtgatttcgctttcttttatttatgcccaaatgtttagaaaaacgaaaccgacaaaaaaagaataggcccggcgttcattgctttttatacataaaatgttataatttctctcgttatgaaaaagaaacggagatcaatgtatgaaagaaactcaaaacgcccgggaaaaaatcaaacagctcttgcacattttaataccgatattcattacccaggcggggctttctcttatgacttttctagatacggtgatgtcagggaaagtcagccccgctgatttagcgggtgtcgcaattggctcaagcctttggacccctgtttacacaggacttgcaggtatattaatggcggtcaccccgattgtcgctcagttattaggcgcagagaaaaaacagaagattccctttactgttttacaggctgtatacgtggccgcgctacttagcatcgccgttttattgattggatatgctgcagttgaccttattcttggccgattgaaccttgatattcacgtgcatcagattgctaaacactttttaggctttttatcactgggaattttccctttatttgtttacaccgtgttgagatcattcatcgactcattaggaaaaacgagagtcaccatgatgattacactcagttctcttccgatcaattttgtattgaattatgtatttatcttcgggaagttcggaatgccggcacttgggggtgtcggcgcggggctggcatccgctttaacttattggtgtatctgcatcatcagttttttcattattcataaaaacgcaccgttttctgaatacgggattttccttaccttgtataagttctcttggaaagcatgcaaaaatttgctcaaaatcgggctgcctattgggttcgccgtgttttttgaaacgagcattttcgcagctgtcacgcttctcatgagccattttcatacagtgaccatcgcgtcccaccaggcagccatgaattttgcgtctcttttatatatgctgccgcttagcgtgtccatggctctaacaattgttgtcggatttgaagcgggtgcagcccgttttaaggatgcacgctcatatagcttaattggcatcatgatggcgatcggcttttctttgttcactgccgcctgtatccttttattcagagagcaaattgcgggcatgtacacttctgaccccgatgtgctccggctgacacagcactttttaatttatgcgctattttttcagctttccgatgctgttgccgcaccgatccagggagcactcagagggtacaaagatgtgaactatacgcttgcggccgcttttgtctcttactgggtcattggccttccggtcggttttatggtcggtacgtttacaagcctcggtgcattcggctattggattggattaatagcgggactcgccgccggagcagttgggctgtttttcaggctggcaaaactgcaaaaacgttattcgcaaaaacaacacatttaaaagaggtgatcaatcatggcaaaaaacaaaaaattattcgagtatctttcccagcatgcggaaaccatcagttcaacatggtatgaaacaatcgaggagactgatcccaattccatttatgcctcaacagatcctgttgtcattcacaatttaaagagccagaatcttgcctttaactataaaataaaccgtatttttatagatgatgaggacgtatacttgcctatactgaaagaatgggcctttgaagtcacacaggatcaagagcatttaaaaactcctatccactatattattcgggagtttgtcagagtgagagatttatatgtttcctatgtgaaagaatttgtccatctcaatcaggatactgtgaaaagcgaagaagccgaagacctgtatcacgcccttataaaagcgtttgatcttgtgattcatatttttatagaagaaatgtacaaaaacacaagccttcagcttcaggcccaaaaagatatgattactgaattgagcgctccggtcattgtgctgtttcacagcgtcggactgctgcctttaatcggagatattgatacagtccgcgccaagctgattatggaaaacacactgcatcaatgtgcgaaaaaaaaggtgacacaactgtatattgatttgtcaggagtagctgtgattgatacgatggttgcccatcagctgttcagtctgattgaggcgcttcgtttaatcggtgtttcttcaactttgtctggaatccgtccggaaatcgcgcaaacagcggttcagctaggtttgtctttcgaaggtatttccttgagatccactctcgcttcagcaattgcatcggacttaaaattaaaaaaggtataaggcttaaggccttatacctttttgattaatcattccattgatacgtccaatatatttcttcttcaaaccatgttgccataacaggttcattatttttcaatttctcttcaagctctctgagcatgccttctgtttgtgtgcggtgagctcttaacgcattcattttaatatcagctacttctttgatatcaagtacgacatcagcttcgccgagaacctcttctctgttgcgggtaatggccatgcagattgtacgcggacggtcttctttctttttgcggtacaatgcacggataaccgcttccccgcatgcatcatggtcagggtgcacaccgtgtccgggataaaatgtgacaattaaacttggttttacatcatctatgatctcttccatgatatcagctaaatactcatcatcttcaaattcgagcgttttgtcacggagtccaagcatacgaaggtcattgatatccatttctttgcaagcgttgatgagctcttgttttcttagcagcggcaacgtttcacgattcgcgaaaaatggatcgcccatatttctgcccatttcacctaaagtggcgcaggcatacgtaacgggaatgtctttttttctgtttaaggcaatgaggcctgccactccatatgattcgtcatcagggtgaggcaggattactaatacgtgttctttcattatttttcacccttttctttaaactgtgaacggtttttcactgatttgcagagaaatagccagtttaccgcccggcagatgtcccgccattaataaacggttttcttcatctaccgtgtattcagtcaagccttcagcataaatccagccttcttctgttttcaagccaacgcggtaaggcccgttgcctttgatttttgcctgatgataagtgacttttgcattgcggatatacgcaacaaccgtcatgttcttttcatttaagtgcgctgaataagaacctgtggtggtttctaaatggatatatacagggcggtccgcatatcgttctaaagatgcttgcacatcttcttttatgatcgctttcatgattgctcccctctttcttcttttaaatactctgcacgttctgtatgtaatttgaccagctgatatttcacagccggttcgagctgtgaattcacaatgcgctgaatcgcggcaaaatatttttccagcatcggttttcggagtcttggatgtgttcgtttatccaagagctcaagatcaatcgcctctgctaccgcttctgcgtcatcatgtgcgagagatcggttattccaaagtgaagcatatgctttcactatctctttatcattgtccatcgtcttgctcctttatgtcttacatacatgaaatgattatacataatatatgcatcagctgaaaagccaaaggcctcaatggctttttgacgcccgtttccacttcacttgtgaaaacgtaaacaagatcagcgcagcccatatacagctgaatgtaaaagccttcgagctggaaaatggctcattgtaaacaaacagcccgatcagaagggtaatggtcggcgcaatatattgtaagataccgacttgatacagtggcagccgtttcgctccttccgcaaacaataagagcggcaaagccgtaaacacaccggccaaaaagagaagcagccacgtccctccgctttctgcacccgctggctgaacatgtccgctgaacagcaaataccccaatgcaatgggcataatcatgaatgtttccagcgttaaaccgatggcgctcggcaggcttgttctttttttgcttaacccgtacagcccaaagctgaatgcgagcagaagcgcaacataaggaatggagccgtattggaacgccgagatgatgacaccggctgccgcaatcgaaacggccactaattgcaggcgattcagtttttcctttaaaaataaaatcccaaggagcactgatacaagcggattaatgtaatagccaagactagcctcaagcaaaaagccatggttgacagcccatatgtatacaaaccagttgatcgaaatcaggatagaagcaagaaataaagagaggatccctccgttctttttcagagagcgcagctcctgccatcctattttccattgccgcaagaaaaaaagtacgatacacataaaaacaaaagaccatataatacgatgagacaaaatatcaagagccggcagctgttcgagaagcttccaatagagcggaaacaggccccacatgataaaggaaacggctgtgtaaataacgcctttttttgtttctgaatattgcatttatatccctgcctttctttagagcatcttatattatatcacgtgaaagatctggcgggcatatactattttgtccgtgaagaaaggatgtgaagacaatgtttgagtggaacaagtactttcctttccacaatcaattttctaaagaagcattaaaaaaagctgatccgaaagaagttgaaacgtatgtcaatcgtgtgatggaaagtgtgttcggcagtgattatgcggctcaatttcctttccgcgatcctcttccccaaaaagaacagcccgccaaacctgatgcaaaacctgatattgatatattcgaaacagcagaccatgtgtttgtaaaggtgccaatcagcgaagaatggctggaacaagtgagaatcaaacacacatctcacgaattatggttggaaaacttcccaagagcagatcatccgaaaaaagtaaaccttccttgtttagtcaaacgcaaaggaacaaaagccgtctataaggatggccttctggaagtcatgtttcaaaagcagcaagactacaatatgtccgaggtagaaatcatccgataaaaaacggcctgcaatcgatgcaggccgttttttattaatagaaaccgggatatcccccgtatggcacgccggcaccaaaaccgtacggtccgcctccatatccataagggccaggaggataggcatagggacgagaatagttaaacagcgcactcccgagaaaaccgcctaataaaccgccgactagaggagcgccaaacaaaaaaggactacgcgccggatatccggctggacctgggattccgcgtaaatacgaatgatgagggtacatgaatttttcctcctttatgtctgcctatacgtaaagtattcagcaaggaagaaaaacgattgggctacggactgtctatgattgttacatcacaagccctgccaataacacacagccgagccctgtaaccgaaagaactgttgtaagcagcgtccaggtttgaaatgtttctttcatactcaagccgaaaaattcctttaccatccaaaatcctgcatcatttacatgacacgcaatgacactgccggctcctgttgcaagcaccattaacgcggggtttacactgccagcctctataagcggagctgccattcccgctgtggtaagcgcagccacggtagcagagcctagacacagacgcaaaaccgcggcgatggtccatgcaacgaatagcggcgacatgtttgtttgacggaaaaaatcagcgacataatcgccgaccccgccgtcaatcagcacctgtttaaacgctcctccccctcctatgatgagcagcatcatcgcaatttgcgaaattgattctgaaatagatctgctgatttcctgcatagatattttacgggcatatcccatcgtatagagtgcaagcaacagcgaaatgagcattgccgttcccggagtgccgataaattctataatgtcttttccttttgaatgttcactcaataataaagaaaaaactgttgccattgccataaagataaccgggaataaagacgtgacagcactgatcgcaaagcccggtgtttcattcagctgaaattctttccttggtcctaaccccgataggtttccatgcttttgatacgcaccaggaaaccgtttcatcgcaaatttattaaataaaggcccggcaatcacagttgtcggaacagcgatgatgattccaaaaagcagcacctagccaatatgggcaccatatgcaactgagatagcagttggagcaggatgtgggggcaaaaatccgtgagtaacatttaaggcggcggccatcgggattcccagatacagaaaagacatttttaattctttagcaatcgcgtaaacaatcggtatcaacagaacaagacccacttcaaaaaacagcgcaataccgatgataaaagaggcaaccacaaccgccgcctgtattcgtttcctcccgaatttgccaatcagcgtaatggcaatccgatagccgcccccagcatctgagacaagcctcccaagcatcgcgccaagtccaaacactaaagctaaatgccccagctgcccgccaattccagcctcaattgaaagaacaattttattgatatccattccaagtccgatctctactaaaaatgaaacgacaatcagtgagacaaaggtatttaattttactttaataatgagaaataacagaatcagcactccgacagctacaattaaaatcggcatggtacccctccaaaagtgttttatatgattctcgcgacaatgttttggcgtttttcatgcctagacgaacagaaaacgctttcattaataactaaaaacgtcttggttatatgattgttatcttttgatcaactaatatgttcatactaatctcctaatcaatgactgtcatcgtttttatgagcttgtctcgattacctaccgcctaacccaatgatttattagttatatgttgattaacttttggttatatgttatgttttttaaagttgactgccaatcattatatctattcattgtctggaagcaaatgagacaatatgagaacagacggataacaacttcacagaaggaggagtacacatgccattattgcgttttgatgtaattgagggccgtgatgaaaaatcgctgcaattgttattagatactgctcaccaagcgatggttgaagcatttggtgttccggaaagagaccgttatcaaattgtccatcagcatcccgcaaacgagcttataatccaagatacgggattagggtttcagagaaccaaggatctggtcatcattagtatgacaagcaaagcaagaaccgaaagccaaaaggaaaaattgtatgctctgcttgctgaaaggctagaagaaaaatgcggaatttcccctgaagacctcatggtatctattactgagaatggtgacgcagactggagtttcggtcttggtgaggcgcaatttttgaatggaaaactataaaatttcgtctccccacaaaaaaaagaagagagagctccaagaagctctctctttttttcataaatgcggaagtcatcagtatagaagcatccagcaatacgaaaaacctggatctccttattagatccggtttaaacgccaattggatgctgactgggttttggccgaaaatataaaattttgctgatttgcataataagataactcataatccccatttacaacaggttggatgctataacttattgatcatttccatgaacatgacacttttgccaatccggaaatgtcagtctgacaaatataaaaagtcatgtaaacggggtgtgaaccgtacttacatgactcaccatggaaacaaaggctctttttcagacgccgctttccttatttctcttcttcacacactgtgtcaccaggctcgcaaaattgatcggcccatgcctgcatctcttgaaatacagcttgaagcgctgttcctttttcagtcagcgtgtagatgactttgaccggcgtttcagggagaacctgccgttcgacaatctcgttttgttcaagctccttcaagcgctctgccaacattttttggctgatcatcggtattgtttccgttatctctttaaaccgtttcggcccatccattagcacatggatgatcagaccgttccatcgttttcccagcaatgagaatgcggattccattttagggcacatcgtatttcccacaagtcttcatcccttcatctattgattgacatgtattcaatgatccattacaataatctttcaagttacatttagtaagcttctaacttttctattatcataccacgtttatccgaaggaggaaacactatgacgaatactctggatgttttaaaagcacgtgcatctgtaaaggaatatgatacaaatgccccgatctctaaggaggagctgactgagctattagaccttgccactaaagcgccttccgcttggaaccttcagcattggcattttacagtattccacagcgatgaatcaaaagcggagcttcttcctgtagcgtataatcaaaaacaaatcgttgagtcttctgctgttgttgccattttaggcgatttaaaggcaaatgaaaacggtgaagaagtttatgctgaattagcaagccaaggctatattacggatgaaatcaaacaaacattgcttggccaaatcaacggtgcttaccaaagcgagcaattcgcacgtgattctgctttcttaaatgcttctttagctgctatgcagcttatgattgccgcaaaagcaaaaggttatgacacttgcgcaatcggcggatttaacaaagagcagttccaaaagcaatttgatatcagtgagcgctatgttccggttatgcttatttcaatcggcaaagcagtgaagcctgcgcatcaaagcaaccgtctgccgctttcaaaagtatcaacttggctgtaaggatatgaaaaaccttagtccgaaatccggactaaggtttttttatacaatcgcctctttgtaccattcacgagcctgttcagcttcatgctgagtcagctgatggcccccgtcctgccagtaaacggaggctgatgccccgctgtcacgcaaatagcggtaaagctcttctgattcttccttcgtgcaaagaggatcgtatttcccggcaccgataaaaacagggagccccgccatatcaggcagctcgataccccgaatcggaaccattggatgatgcagaatagccccttttaacacatctttataatgaaaaagcaggcttgccgcaatgtttgcgccgtttgaataaccgactgcaatcactcggccgcgattaaactgatgcgtttctgcagcctcgtcgataaaatctttcaattctcttgtccgcaccacaagatccttttcatcaaaaactccttcactcagacgtttgaaaaatcgcggcattccattttcaagcaccgatcctctgacaccaagcaaatgggcatcagggtctataaaccgccccaatgaaagcagatcgtgttcattaccgcccgtgccatgcaacagcaaaagtacgttgtcagatgttcctttttcataaatatgcttcattataaattcccccttttaaagttcaggtaaaatgtctgtaatttgttgtctatgtttctccagccattcaggcagttttaaggaagtccctagctcagcaaacgtttcatctgtcataaagcccggttcatctgtggcaatttcaaataagataccgcctttctccctgaaataaactgatgtaaagtattccctgtcgagaatttctgacgcaggcagatggttttcagcaataatcggcagccatttcgcctgttcctttttcttagtccgaaacgctacatggtgtaccgtaccatatcctccgactcctcttttttcaggatgtaaatggacatcaatgacaccgccgacggccgctgaggatgccagtctgacaatctggtcttcttcggccactttggtgtatccaaagctttccgttaacaattgtatggtcgcctgcgggtcgtaagaatatagcagcacacctttcattcccgtaattgcttcatttgttgtgatcccgtcaggcgtccactcgcttttgccgcttttcgcatcctccatgatcgccagcggaaggtcttctgtatcgtcaaaaataagacctttttcaccaaacaacgttttttcctctaggctcagcccgcttttctcaagacgctccttccaaaaagacagggagcctgagggaactgaaaagtacacccggcccgcttggccttttcctaccgttccctgtccgcttccttggaacggaaaaaaggtcattattgtaccgggatctccgttttgattcccaaagtaaaaatgatacgtcccgggatcatcaaagtttactgtttttttaacaagtctgagcccaagcacttctgtataaaatcgcaagttttcttgcggatctctggcgaatgctgtgacatggtgcaatccttctgttttcattttctcactcctatttatctcgatttcaagatatttattattttaaacctttattgaaaaggatgcaaaccatgtgttttgtttaaataactgaaaaaatcatttttttctaataattatcttgtgatcttttcttacaactgctattatagtgagcattatcatgtttcaggaggaaagtaaatggttaaaaaagcacttattgttattctcattcttttgccattcgttcagctcgcgcttttgccgcttgtgaatcgaatagaaccgattatgttcggcctgccgtttttccacttttggctgctgctgtggattattgttacgccgttatgctcgtttggcatttatcagatgcaaaaaaaagatggaggacttgaataatgcaagggaatctgactgcacttctcattactgctattattgttttaaccgttgtctgtatcggctttctcgccggaagagacaaatcctcacgtacttctgtggaagaatggtctgtcggcggcagacgcttcggcggtcttctcgtctggtttttagtaggcgctgacctttatacggcctatactttcttagggttgaccagtactgcttttacaggcggaagtgttgcatttttcgccattccttattctgtgttggcctactttatcgcctacttcttctcgccaaaactttggaaagttgcgaaaattcataaattaacaacactcgcggattatgcccgggaacgttttaacagtaagcttttggcaagcctcgttgccatcgttggggtactcatgcttattccgtacatatgccttcagctgagcggcattcaagacacgcttcaggttgccggcactggctatattaacgtaaaattcgttgtgatcatttcatttattcttgttgctctttacacattcttcagcgggattaaagggcccacatatacagccatcattaaggacattttagtatgggtcattatgctgtttatggtggtgtccctccctctcattcattttaacggctggacgccaatgattgacacgttagtgaaggaagcgccgcaaatgctgacgataccggcagaagggccaaaaggcatcccttggtttatcacagcatctattgtttccgctctggcactttttatgtgggcacacgccgctacaggagtttttacagcgaaaagcgctgatgcagttagaaaaaacagcatgtttttgccgctttacaatattgtgttaattttggtcatttttcttggctttatcgcctttcttgttctgccggaagatacaaatccaagactcgcgctgctgcatttgattcaaacatcttacggcggcgtggcacaaggttttgcatatgccactatcgctcttgcttcattaataccttgttccattatggcaatcggcgcatcgaatttattcgccaacaacctataccgggatttgattcatccgaatgtgtcgcaaagcaagctgactcttgtcacacgttcaatggtgtttgttgtcatcggtctcgcgctgctgtttggaatgctgtttccgactgccttagtgacacttcagctattaggtgtatccggtatggtgcaaatcttccctgcgattgctgtcagcctgttctggaagcgtcaaacaaaagaagcgacagttatcggattattagtcggccttgcggttacgtttattgtgtataccactcaatccgcacatggcatttatgaaggattctggggattggccgccaacatgatcgctgtggtgatcctgaatccgctgttcgttaaaaacgcgggatccaatcctgtcattgaaggtttatttggcaaaaaacaagacgctaatccaaatcaaaagggtgcataaaaaaaccatacgcggcagccgcgtatggtttttttacatttcttttttcagtgtttcaattgccttttccatttgcgtatcattatcagacagcttcttttgaagttctatcattaatttcgttgttgtatcgccagtcagtatgcctgtctctttcagcttctcttttttctggaactgtttgacgacagatacaaagtcctggtcatacgtactgttaacctttaccttgtaaccaagtgctttgagcattttctgagccactttgacgtttgtgcctgtatcacctgatttgtacgttttatctgcgtccaaatacggcagcttcgcgtaatcaggcagctcagctttcacttgaggcttgatgccttttttgtgaatccattcgccgtcagcagtcagccatttggcaactgtcagtttgacagtagagccatcatcatattcttttgccgtttgcactgtacctttgccgaatgtcgtctcgccgattaacggtacgtttgacgattcatgaagggcagcggccataatttcggctgcgcttgctgtaccgtcatttactaaaacgacggtcggcttggtcactttccgttctttttcggccttcatgacttcttttgaaccgtttttgtattcaacctgcatgatgtttttccctttatcaatgaacaggttgctcatcgtaatcgcctgttccattaagccgcccgggttgcctctcaagtctaaaatatagcctttggcgccttttttctctaaactgtcaatcgcatctgtcagctctttagctgttgtttcagagaaagaagtgatttgaatttctccgatgttgttgtctttcatctctgaatagacagtctctacaggaatggtatcgcgcttaatggaaagatcgatattccccactcccgctctgttcagttcaagcttcacctttgtgccctttttgcctcggattaaagcgacggcttcatttacattcatgccttttacgctttttccatttaccttaatgatttggtccctcggtttgataccggctttttcagcaggtgaacctttaattggggatacaataaggatttctccgtctttctcctctacttgggctccgattccttcaaaagatgctgaaatcgtctcgtcgaatgatttcgcttgctcttgatccatatatgtagaatacggatcatccagtgattgaatcattcctttaattgctccgtctactaatttgtcatcatctgttttttggtaataatcacttttgatttgctcatacgctttatttaatttgtcgaacttgctgtctcctgtgcttgctgatttttggcccaggatactggaattgcccgtaataaataaagtaagcgccgaagcgacaactgcagtgatcagcacaataaaaaacagttttaattgccgtttcaattaaacaccacctttttcttcttacattattatcatggacgaattcttattcgtcaactcggagcagaaatgaaagagaaacgcccttcttttgcttttcataaacctatgtctttatacgacatatgataaggaaaaaggaggattcgatattgagccgatatttagaaatgctgtccttattcggtgtcgcaggggcgcacccaggcgggctggctttttcaaaagcggtcttgcaaaaggctgcaccctctccgaatcagccgattcttgatgccggatgcggaacagggcaaacggcggcttatttaggacatttgctgtatcctgtaacagtcgttgataaagatcctattatgcttgagaaagcgaaaaaaagatttgcgaatgaagggcttgccatccctgcataccaggcggagctggaacatctcccgttttcttctgagtccttttcctgtgtcctgtcagaatcggtcctcagtttttcacgcctgacatcctctcttcaagaaatttcaagagttttaaaacccggcgggatgctgatcggtatcgaagctgctttaaaaaaaccgatgccccctgcagaaaagaagcaaatgatggatttttacggatttacttgcttacatgaagaaagcgaatggcataaactcctaagatcctatggctttcaaaaaacagaagcgatgacacttcttccggaagacatggaatttgaaccaaccacagaaatggatttatcgcaaacgattgatcccatctattacgatacgcttcaaactcattatcagctcatgcagttatatagtgagtacatgggtcattgtatttttatcgcgtacaagtaaaacggcgtatcgccccctgttttcgtccaacctttttttcctatctatcatatgctgatagaaagtcaggataggaggggaacaatattggagagatattatcatctttgcaaaaaccatcaaggtaaagtcgtcagaattacagagagaggcgggagagttcacgtcggcagaattacccgtgtaacaagagacagagtttttatagctccgaccggcggagggccaagaggtttcggttacggatattggggcggttattggggatacggagcggcttacggtatttccctcggtttaattacaggggtcgctcttgctggtttattcttctggtaagcatagaacaaatgctagattcaccagacacaatgaagcccgcttatctagtgtaagcgggcttttcattttaaattttcttcactttttcaaagtactcttcaagcgttaaatcattatcttggatgacctttgcggcttttttgcctacatagcgcagatgccatggctcatattcatatttcgtgatatcttctttatttttcggatagcgaatgataaagccatatttataagcattgtcctgcacccatttcccgtctgccgtgcttccgaacgcttcatttagctcaaagccattgctccggctcgaaatgtccatcgcgaggcctgtttggtgctcgctttcacccgggtaagcaaccgcttcctttgccttcttttccccttttaggcttacttcattgtcaaaaatgactttctgtctgtcatacgaacggtaccctgagacagctgccagttcatagccttcctttttggcagcatcgaacattgtttttaatgcgtcggccgcttcttttctgatgtaacgtttttgaatcttttcttcaaaagaaaactctacatctggtatgacaagatcgctaggttcatagtttccgggcagtgcatattgtttattgacaagcgcgagtatattttctggattttgaatggtttccagaccatcgacttttttaatatcattgaaatactggctttccaatgaaaactcactgttttgagtgtttgattttttgctgtcagctgttttttgttctgtttgctttgtttctgctgtggttttcgtatccttttgagcatctccgttcgacatgctgcagccggctccgactattgccgttacactcagagcggcagccagtgagaaccatttaccggactttttcatattacattaccttccttttatcaatcgtttccgcattcataaagaagaggctgccggcacccagcacgcctcttgatatattttattgtgatacggaatgtaaagccacttctatcatatcatgaaatgtcgtttgacgctcttccgctgtcgtttcttctcctgttaatacgtgatcactcacggtgagaattgacagggcttttcttccgtgcttcgctgctaatgtatacaatgcagttgtttccatttcaacgccaagcacaccgtattttgcaagtttttcaatttgcgaatcgtcattgtagaactggtcagctgtaaatacgcttcctacagtcaccggcacacctttatcctttgcggcatcataggcattttttaaaagctcgaaatctgcgcaaggcgcaaaatcaacgcttccgaaagcaactctgttcatttgtgaatcagttgaggaggtcatcgccaaaatgacgtctcgcactttgacatctttacgaatagcgccgcaggaaccgactcttattagattttgcacatcgtagctttgaattaattcattcacataaattgaaatagacggaacgcccattcccgtgccttgtactgagatttttttacctttatatgtacccgtaaatccatacatgcctctgacttcattgtagcattctacattttcaagatacgtttctgcaataaattttgctctgagaggatctcccggcaaaagcacagtatccgcaatttgtcctttttcagcacctatatgtacactcatctcatatcctcctgtaaatctaaattatcatccagcccgtccattttacaacgaatgtcatgatgaaacaaacttcagcattgattataaaggaatatgtcgaaaaaagaaatgttcgaggatctgttaggcacttcctcagaaaaacggataatcggggtgttaatttgaaaacctaaccgcaggaaggaggggtaggacatgggtaaaaaacatcgtaaccggatcaccggccaaaaaaagaacaatcatatacctgaaaaagatatcattgcagctgaagaagcacacgggaaagaatattctgctgccaaacgcaagccttaaaactgcagaaaactgcgggtttccgcagttttcttttcattatgtcgtttgtacaatcagacgattgattttcctccagccggcgggaagcagttgataatatgttttcccttttctgccctcgtcaatcaggatcacgtcccctgtggccatgaatcttgcatcataatcactcggaacagtgtcgaatacattaaacaaagagaatgctcttttcagcacgtcttgatgatcgctcccgttcagttcagttcgatagacggctctgtagccctttttttcgccaaaccggggtgtctgaaatattgtcacgtcataggaacaagacttctttttaaacacggataacatcatcaagatcccctccctcttatttctttaacatattggcgtttttgctgtgttttcctctctctatttttgtcgaaaccgcttaatcttttcgtcaaaaccttttactaggaaaaacagaagcaagccgaggctaaagccgcctaacacatccgtcacaaaatgaacccccagatacactctgcttatgccgactaaaacagcaattacaccggctatgatatataccatttttttatgcttggacaaaaacgggaggtgtttcactaaaaagtaagcaataacaggatagacacaagcagcattcatggaatggccgctcggaaaactgaaggatgattcatgaaccagcggtgcaaaatcaggcctcactctttcgatccattcttttaagactttgtttaacagccgatctgtgccgaatactaagagcatcaacaggccgtcccatgtttttctgtagaaaaacatgcctgctccaatgatgacaattagagggagcagaaaagaagaagcaccaagatgcgtgatccccgtcatgacttcattaagccatggctgacggatcaaaacagctgccttgcttattgcttcatctgcagattgaacagcatttgtatgaatggccgcagctagaatgagaaagaaaagaaacaagctaacgggcttgtacaatttaaccacctcaattttcacagaagtcatagaacacgaataataaaaccggagctgaccgctccggttttaagcctcactcatcttcatccagctcttcatctatcatacatttttctatcaaataatcaaaggtaatatcagcgatttcaaacagctcatcctcactcggtatgtagccccgtcttgcaagctctctgtaaaaaaattcagcgatttcttccgtatcaatcacaagatctatttctttcatctccgtaccgcctccttttttatgttttatgaaaaaacaggctgaattatacccggtgttctaaacaattctttcagtcatatattgaataaaaaacgagccatgggaggctgacgctatgattgctaaaatgatggaagcactggacggagaaagatttgatatcataatggaaaaaacgctcaaaggaatgacgcgtgtgatgatttggggctgtctgccatattttttatatgtcttgatccgtatgttcacaaactaactgaaatgctcttttaaactttccaaaacaaacatcatcatgtctttatattcttcatcctgaaacatttcgtacagtattttgtagtcattataaatatccagaagctcatcaacaattgacacagcaaggatgtgaagggtatcttgatcttcatcatcgccttcaaactgaagaagagcagacgatgcgatatcttcgccgatctcatggccagtttctccgacataatggacaaacaacagctgatgcacaaactggtccatttcatattttctaagcaccagcgtgagatcctcttcctccgtttcaagccactctccatcctttaaacgggtcagttcataaatgatatcttcccagccatcttctaaatatctccaaatttctgttctatggccgataatgcgaaagagttcttttccataatcttttacataaacaacgtccccaataaggaattcatactcaatatcaagcttctccatgtcgacaatgacaccctcataatctttataaagctgaatagatgattcaaagtataaaacttcgttatgattgacttcataaagatagtgtttatcaatttggtgcacttttgtgatggtgccgactgttccatacataatgacgactacgatatcccctacttggaatttcggtttattttgcttcatggtgtctccccctcgccgcaacatttctcatacgctatcgtatgccgggtgaagccaattcgcatgggcatgaaaaccaaaggaaatatccaattatggtatgggggacataaaaaaatccgcagtgatctgcggatgaaacagctattatctgccgtgcacttcagactcgtattgatcccaagcttcatcaaacgtcgccatcgtgtgaaggtaatcagcattcagctccaaatatgaactgatttcatgataatcggtagatgtttttggaaagctgtgatcctcatacgcctgattggcaaattcactgatgctgtccttcggcttagggtgcctgtatttcaataaatagtgataaaaggatttcatgggtttcccctcctggtgtctgtcttttgttgttctattatacagttcaagtgtaaaattacaacaaaagaatactgaaacatgactcaggagaagtcaaaatagttgcgtttcaaaattctttctgtctccatgagctgctgatatgtcaggctttcaggcagtttttttgtttgaattaaaagcagctgatcctcaatctcctttaccgtgttttcctcttgataggtcataccgcaggaagaacataccatggcaggggtgtctgtcagttctatagcccttgttccatcagggagctcccagtacaccgtgttcctgccgggcaccgcttcaagctcgccgcaccattcgcatgttttcatgaagaatcccctccgcattcagtctctttctgttttttctgctgcgccaaaaatttcttttctttgagctgatctcttttctcacgccgattttttaatgtttcatgctccggatttgcgatgtatgcctctctccttttgattctgtctacattttcaggtgtaaacgaaacctctttgtcagcaaaaatggcactcagcccgatcggctccttttcgtcagcggtttcagggaaaacggactcaaaataggcgtctgcctgattggggatataattctctggttccggatatgacgtaatcacaccttcaaaatttcttaagatcactttgtcaggactttgtgacaggacatagtttggctgcagggcgattttaccgccgccgcctggtgcgtcaacgacaaaggtaggaaccgcatagcctgaggtatgacctctcagcccttcaatgatctccaaacctttggaaacaggagctctgaaatgcccgattccctctgacagatcacattggtaaatataataaggacggactctgatttttaccaagtcatgcatgagctttttcataattggaaccgaatcattaatacctgctaatacgacagcctgatttccgaccggcactcccgcgttcaccagcttttcacatgcctcaacggattcttctgtcatttcgatgcttgtgttaaaatgggtgttcagccagaccggatgatattttttcaatatctcgcacagatgatcggtaatgcgctgcggaaagacgacgggcgctcttgttccgattctgatgacttccagatgtggaatgctgcgcagctcttttaaaatatattctaaaatttggtcgttgatgagcagcccatcaccgcctgaaattaaacaatctcggatttcaggtgtttcccggatataagcaattgcagcatcaagctgttttttggggactcccattccgatttgtccggaaaagcgccttcttgtgcagtagcggcagtacatggaacattgattcgtgacaagaaacagcacacggtcgggatagcggtgtgtcagaccgggtaccggtgaatcttcatcctcatgaagcgggtcttccagatcgtattttgttttgtgcatttcttcagaaagcggcacagactgcatgcgtaccgggcatctcggattgtcggggtccattaaagaagcatagtaaggtgtaatatttaaggggatcgttttagtagaaattctgacgccttcctcttcatcctcagtcagattgatgactttctttaaatcatctaacgttcttacagtatgtgtcagctgccaaagccaatcgttccatttctcttccggaacgtccttccataactcgatctccttccaatgccgtttcggtttataccatttgtttttcaaacgaattcctcctcgcgcatattttgacttacagttgcttgcaccaaatattcatgttttcaaggccttcggctataaagcaattattgatcagccttccgccattttgataacctgaatggtacaacacagcattcatcccaaaagacgaagcacgggcgagagaaaatacatgaaagatatcctttccagccatttctttttctaacgcctcgattaaaaagcttgttaacgaatggccgcgatattccggcagcacagcgcaatcggttatttctgcatgcccaagctctggattgatttctgcgcttgctgagctgatcaggcggtcatgatcaagcatgatataatacaccgtatttgcattcatcgtcttttcaatataagcggggtcaaataccggtgttgggtacgtgcggaatacttttttatacagcatcgatagctggtacatgtcgtttgtttctgcttttctcatcgtaaaaacgggtgtactgtcgttgcgaagacggggcgctgtgcgatatatggcttcgatgatctcctgttcctctgtataagaatctgtttgtctccggctttctgaaaggtaacgtaccatgacacaagccgaatagccgagataatagccctttagatagccctccggcgcaaataattgtttggcaaggatcggctcatcatgctgcttcgcatagacaatgattttttctgcattctcttcttttgccgctgccaagatatccggcagggccttctcaatagctccgtcataacggaccactctgattcgtttattaaagccgtcatggtccaaaactgctgtgacaccgctactctttattgacttgagcatccgcatcctccccatctgtatgaagcccgcaccaatccatgacaaaaagtgcaataattttagcagattctatcatggcttcaacctcaatgtattcattggcctgatgagccgtttttgtttcccccggcccgaaaacgatcactggtgtatctcctgcatggtacaaaagccctccatccgttccccacggggaagcctcaataatcggctctgtctgtttcattttttgataggctgattgcagcacagaaattaaagggtgatcatcaggtaaatcattcggcagccattgagcgccaaaccattcgacttgtacgggatggcgtttaaaccattcgtcatggtattctaaatccttcagccagttttccaattcaagttttacagcttctggtttctcatggggagcaattccgcatctcccttctataacgacacggtctgcaactgaagatggccaggcaccgcccgagatcgtgccgatattcaccggtaccggtattgggatattgtcatacagcggatctgaaattctcgcattgcggactttctccagctcttgtatcgctgtgataacgtgcatgcttttttcaatcgcgcttaccccttcatagcgtgtgcccccatgtgcggctaatcccttcacagtgatccgaaaccacatcgaaccctgctgcttaataaatagtttcatattcgtcggttcaggaatcaacgccccgtcagcacgatagcctctcatgatggcggacagtgtaccggcgccgccgcactcttcatctacaacactctgaaacaatacatctcccttcaatttgacatcgcaagcgtgcagggcttctaaagcaaaaagaagggctgtattgcctcccttcatatccgttgagccgcggccgtatattttaccgttttcttcgacagcttgatacggttcatacttccaatcctttacgcttccttcaggcacaacatcgatatggccgttcaaaatcagggacctgcctccgccggctcccgtttttttagccacgatattcgggctctcatgaaaatcggatcggttagatttaaagtagggatgctgttttaattgctttatacttggctcccatacatcaatgtccatatgaaattgccgcagcttttcaagcacaacagcttgggcgttaaactctgaccccaatgtgcttttttccccaatcagccttttgagaagacgaatggctttggccgaatgctgatcaagccacccgattacttttctttcaatgtcttgcatcctcattccccctcttaagaaaaaggcatatctattttgatttcagcatctgtcagcctcgtcacctcatcgattgtcgagccattcatcagctcttttaaaatgaagtgatggctatcgacctcaagaaccgctttttcggtaataatcaaatctacacagcctgcagcagttaatggcagcgtgcatctttctgttaatttaggccttcccttttgatctgtatgactcatgacgacaaccacttttttcgctttttgggcaagctccatcgccccgcccataccaggcaccttttttcccggaacaagccaatttgccaaatctcctgattggctcacctgcagggcgcctaaaatcgtaatgtcaattttgccttttctgatcatcgcaaaagacatggttgtatcaaaataagaagccccttttacagcgcggacaggatagcccgcggcgttgcataaatgcgcatcctcttctcccttttcgggactttctccaatgccaaggacaccgttttccgcttgaaacatgacctgcatgtcaggcttcaaaaagttcggtaccaaggatgggataccgataccgagattcacaatcatgccctgcttaatttcagtagcagcccgttttgcaatctgttctctttctgctactcccaagcccatttccacttcactccctcgcttcttacaactccctcaacaaaaacccccggtgtgacaatcatttcttcagaaatctcacctatcggaacgatacgctcagcttcggcaaaggttctcctggcggccattgccataagcggattcatattgcgcgcggttttgtcatacgttagattgccgaattcatctgcaatgtaagcattgatgaaagcaaaatcagccgtcagcgcctcttcaatcaagtatcgttttcccgccactgttacgatgtcctttttttcgcaaaccatttgattatcaatgcccacgtcggttaaaataccgccaagccccgctccgccggcgcgaatccgttccgcaagcgttccctgaggtgaaaattgaacctctaacgtcccctctgtcatctgttttccggctacaggattggaaccgatatgcgaggcgatcagggttttgacccgttgattaacaataagcgggccgatccctatatccgggaaaccggcgtcattgcagatcacagttaaatccgttacaccgctgtccaatatcgcttcaatcaatgaaggaggcgacccgactcccccaaaaccgccaaacatcagaaccgatccatcccgaacatctgcaattgctgtgtcaatgctgattgctttttgaaatgacgccatttaatgtcaatccttttttaagtttttttcgaccgctgcaactgtttctgaaaaaatagagataagctcttccatttcaccgtctgaaatggtaaaaggaggagcaataatgacagcatctccttctccactgtctattccagctttggaaggataaacaatcagcccgcgttttttcgcctcgctgacaataatctgagttatcgtctgctcttgcggaaacactttcttcgttttttggtctgccacaaattcaacgcctaatagcagtccttttccgcgcacatcacctataatgccgctttgagatgccgcctcatcaagctttttcttcagcacagcgccctttttttctgattgtttgatcaagccgtgctttaacacatatcgcaaaacttcaagagcagctttggctgaatagggatgtgcactatatgtgtgaccgctcataatcacacctgacccttgttttatcgtttcaataatagaatcagatacgacggcagcagcaataggcgcataaccggcaccgagtcccttccccagtacagcaatatcaggtacggtgtcccaatgctctgtcgcgagcatccttcctgttctcccaagccccgtcatcacttcatctgcaataaaaagcacatcgtgtgtgcggcatacctcacttaatctctcataatatcccggaggcggagtaatcgctgctcctgcagcaccaataataggctcagccacaaagccggcgatgaattggcttccgattcttttgatcatagtgtccagttcatcagctgcagtctgaacaaagtcttcttctgtctcgtgattcagccgataaatatgtggagctgagatagctggataccgttcaatgagatgggtgaaccggtatctcctttcataaaaaccagataatgaaagcgctcccaaagttattccgtggtaactgctccatcgagacaaaaagatggatttttgtgtttgctttttttcctgccaatactgaatggcgattttcatagctgtttctatcgcttctgatccgctgttgacaaaaaaagaccaattcacatctccgggcagctcctgtgccaagagcgcggctaattgctcggcgggctcactcgtaaactgtgagcggtaagcaaaagacacctgatcaagctgttctttcagcttctcagtcacatcacgaactccgtggccgatattacatgtcaccgctcctgacgagccgtcgagatatttttttccggtctgatcataaacatatgaacccttcgcataactgacaaccggataggccgagctaagctctggcttaatcaaataactgctcatgctcccacctcaaaaccccttttaccatattgtatgagtgtccaaatggcggcatgacgttccccgcaaaaactttttcacataaaaagagccttcctaatagggaaggctcttttggaatttcagcatctagcaaataaaagcggctccaacaataattaataaaatgaacaagacaacaattaacacaaatgtatttgtcccgcagccaaatccgtaaccgtacccagagtatccatacatgctgttttcatcctttcttatcacgatatacggcattttatgcgggccaagtcccaaatggtttgtgcaaacgcctatttcatgtaaggaaataatgaaatacagtatgcacccgctcatattttttaaacgtcagcttttcgtaaaactgagttgcaccgtcagtgcttgcagcaactaagtaggctgcttccattcctagtgatttggcgatggacagcatttctttcactaagatactgccgtagcccttcctttgaaactgatctaaaattgccacttcttcgattttagccgttttctcttgatgatcgataaacagctcgccgcacccaatgggaactttctgtgcctggtcgctgtaacaaacaacaagaatgattatacctgcttcatagaaaggatattttctttttaatttttgttcagcgattgcttctccaatataaatggaatcgtaaattttcataatagaagatccgtcgctaagacttttcgccgtcccccatgcggttaaaggatgtcccatctgccccttccagtcactaagcttcatgtcatatagtagctcatcctcgacgacaaaaccgctttttacaagcgactgcttcaaaccgagcggaaaaacatgctgcggcgacgcttttaaatggagataattcgcatcaagcagctttggtacggagggtaaaaagttaagtaaccgctccaatggaaacgtatcatggagctgaacaaagttatgagaaaaaatttgcggaagctgcggatctctgtatacgctgtaatgatcaaacgatgccgattcagacgttaacaatatatattgatgttccgtttttgaataatgtcctgtcatgaacgtctcctttttatgacctatacctttactctgttgcaatattcaatttctttataatctcatcgtacaccggataaaacggctttccaattggaaattgctgaatatttcggaaagaagcggagattggcttctgatgtaaaaaaaacttccttgttacttgttcactaatcgggtgaaagacgccgtttagaaacaaaaacggctcgcgttcgatgaaaaacagacgtcggccaggcggatttttgatcaattcagatcgtttccacgtaatcggcggcccttccggaagcgcctccatttcttcttttccaattgtcactatgtcttttctttgaaattgataaaattgaaacgcatactggtccacaattcgccttttttttccggcttcgatataaaatattgcaggatggtcagcttcctttactaaaatataattcggaatgtttaaaattttgccaatcctatattggaataaatatgggtctggaacagcgacagtccgatttagatacaaaaaaccccacttttctccaacaggatgccttacaccctgatcaaaaaaatacacattttgatctgaaccttttacaaaagagccgtcaatcaaatcggcgggcagaaaccgatatgcattttgaaatgaatctggggttttataggttgtgtctaatacttcatttatcggcagaaatggggtaaagttgttgagtctcgcccaaaaaattgcgtcgccatgattccaatgcttcatatcatcatcccagtagcctccaaatttatgatggatgagattaagtaacgaacggcgatgcataactgagcaatgatcaacttgaaaagcggcctgatcaagcactgcattggcatttctgtagaaatgtgagatttcctctcccctttcgtttacatgtacaactttttgttttgaatagaccgcctgcgcttcaggcttatgtgaaaactcttgcaccatacggctcagccgctcaggatgataaacagtgtcgtcagtaagataggaaatgtaatcgccgtctgcaaatgggagcgcactgttaattaatgtggcataacgggctgtttttaatcgatctgcaggatgcacgaaactgttatgatattgaatgcgccggtcatggagatacttgtgaatcaccgcagttgtttctgcattcgaatgatcatccatgataaaaagctcccaaagatcatgcgtttgctgtatcacgctttcgatcgctttttgcaaataatcgggtttgttgtaacttgttaaaataatagacactttctctcccatctataccgcctcccaccgtcaaacataaaaacggctccgcagcaagcagagcctctgtcatcatttaaaaagcaccccagcttacaacacttgagagtgaaacatgagctctcgtgttatttaacgggttttggaaaataaccaaatcagtcagaacttcttttacgatgacattttgaagtgtatctccgttgatcaaattgacttttgaaaccggtacgcccagctcttttgcaaaaacaagctggcgtctgaggtcagatggatttccttcagaagacgattgacgtatcagcagaatcagcaaaagcaaaataaaatgcagatcatcttggttttcttctcgatccacttgtttctctaaatccaaatcatccctctcccttatccttatctctgtttcacaatatgtgcgacttcgatttatggtataggctatgtccactccattaaaaaatcagcattttccttaaatagatgaaaaatagatcaggtacggcgttcgactcataccaaataacagccggaagaatatgaataacgtgagttcactatcgaataggaggtgtgtgtaatgagctctgaaaatgcacagttaaaaaaggatttaattaaagccgttttaagccctttatttccaactgcaacagaaggaggagaaaatatggatagtaatcttaaagccttgcttgatgctgccatcgatcaaaaagtagatgaaagtgaaacggttacggcagaatctattttagacccttctcttccggcaagatggatttttgccagaattacgccaggcacgacaatcagcattgtgactgattcaggtgacatgatcggaccggttgttttcgttgctttcgatcaggttcacgggatcgtatttgtaacacaggaaagctccgtcactccggcaggccaagctacaacattaattgatgtagacaaagtagaaagcgttacgttcttttcataacatccgatgaaagtcttgtatatccagtcgggatacggaggaatatacagttattttgatcgctgggctgaagaatgttttcagaacactcatacagagtatatgattgcagataaacctgaagcagaatctttgatgaagatcgaagcgtttcagccggacttcacacttatgatggttggagaccgcgttcctcacgactggctgacctggttaaagggtaaggatatccccgtgtatgtttggctgaccgaagacccattttatatggatatcagccttcaggtaattaagcttgctgacgccatattaacgatagaacaaaatgcagctctctactatcaagagctcggctaccagaacgtctattatgttccgataccagttaaccatcggctgtttaaaaaaatgggcaccgaacattcctatcattcaaatctgttaatcatcggctatccttaccctaatcgggttcagcttacgaaagaagcggtccatctgccattcacggttcgggtaatcggcaaggaatggggaaaatatctgcctaaaaaagtgctcaaacagccgcatattgatgtcgtcagcacatgggttccacccgaacaggccgttcattattataatggggcagacatcgtaattaatgcgcatcgtccctatcattttgctttcaaccaaaatactatgcgcatcaaaaatgccagttttaataaccgaacgtttgatatcgctgcatgcgaagcatttcaattaacagatttacccgcggcgcatcctttttcatcctttatttcttatcacggcatgaacgactttaaggaaaaagccgctttctatatcaaccaccctgaagaacggcaaaaagctgcagcagccaattataaagagatcgtacccgcatttacgtttgatgagcttcctgcaaaactaaaagcgattcatctggcgctctcatgaaaaatcgttcattgctatgaacgatttttttattcatagaaaaaagcagctgcacaagctgctttctattctagccgtcagaacggtctttcagcttcctcggatttacctgtttatgaagatcaggcatttcgccgagatgctgtgcaatttgttcccacgatacaattttgaaattttgattgacggcttgtccgttatcgatattttcgccgtcctgcgccacaaaaatcccgtacggatattttgggccaagtccgaaaccgagaacatcaataccatccgtgtcactagtaccgtctatcttctcgccatctgtaatctcaaagttggctacatagcgatttttcccctgccgttcatacattgcatagctgttatttccttgacttgaagccatgagatatcctttgccatttggtgcataatagattgtcagtccttcaatatcagctgtcaaatgatctcctgtcgcacggtcaacaacctgcccctttgaccctccgccgggctcagcgttaaatttccagatggcttcatcttcctctgctatgtataggttcccatactcatcatccgcaacaaggccttcggtctgagaattcaacttaaattcacgcacctttttccctgttacataaccctttccaccatcaacaatttcatactgctcaaattccccttgtttgcctgtcactaatgcgtaaaatgctcctgttttctggctgtgatacaagctgaatccataaacctcagaaatattggtggaaataggatggttcggatctgtaatgcttttcaattttcctttatccccgtctattgcatatacttcaattgtattttttccttcggaccggttggatgcggcagcaatatcaattttttcgccgttcaatggaaaatcatagcgcagatcgacattattgagcttgccaaactcataagaatgaagctgttttccgtctaaatcatacacaacgagccctgacttcttatttgttgtaatcaacttgcttttttccgggtgtttttcatgaacccaaatggccgggtcatctgctgcatcatcgccagatgcgaccggatctgtctccgtgtgtgcagtcactttgaaatgatgttcctcattcacataatgagccgacaccgaggttgctgtcaggctaagcaataaacccgcggcagtgcttagcagcattgtttttgaaaccttcatttggtaccctcctcttttatcactaacactactattgtaaaatatatacaggtgattaccgtgaggaaaatgaacctttttttatagggtttctgactcataaacaacttattccccaaagaggtggtgagatgactttgccagatttacttttgcggagcgaaataaaaatatgttgaatatttagtacattgtttatttagttttgttttttcctagttacgtccgtttttccattttctattaaaaaagaacactttgtgacatgatcattcccctaaattttgttttattggttgctttcattaattcgattacaaagttgaacatatgatgcatggtagagaaacgagagttggaggataagccatgcctaaacagcaaacagcagaactaaaaccatttttccataacaaaacagttttagtcactggcggaacgggttcaatcgggagtcaaattgtcaaacgccttttgctgcttacacctaaacaggtgattgtattcagcaaagacgacagtaaacagtatgtcatgagccaaaagtatgcggaggataagcggctattatttgtacttggagatgtacgcgatcacagaagggtgaatcaggtgatgaaaggcgtcgatatcgtctttcacgcggctgcgctgaaacaggttccgacatgtgaggaccatccatttgaagcgatccagaccaatctcatcggcggacaaaatgtggtggaagctgccctttcacaccgagtgcagcatgtcattaatatcagtacagataaagctgtatctcctgtgaacacaatgggtgccaccaagctgttatctgaaaagctgtttcatcaagcaaaccgccacgtccaaaacaaaggaaccttgttttgttcggtccgctttggaaatgttctcggttccagaggttcggtcatccccatattatttgaacagatgatggagggtgaacccctgaccatcacagacaaaaacatgaccagatttttcatgtcaatagacgatgcagctacattgacattacaatcggctgctattacaaaaggcggagaaacctttattttcaaaatggaatcactgaaacttgaagaactgattcatgggtttgaagaatatgcatcgcagcacgggctcccgcggccggctgcagtagaagtgggcaagcgtccaggtgaaaagcttcacgaagaattaacatctccacatgaaattgaatcactgtatgaatggggcaacctttatgcgatccttccagagccggaaaaacatcctgactttcgcaaagtcaatctgcctgggtatcaatcagatcaagccccgctcattacgaaagaaagaattgctcagattattgaagaattgcatcaagagaaaaaggcataaaaacaagcctgtctatccattaggcaggcctgtttttaacactttatttattaaagagatgcagatagctttcgtatccttcttcttttagcttatgcttcggaacaaaccgcagcgctgctgaatttatgcagtaacgaagtccgtttggaccaggtccgtcattaaatacgtggccaagatgagaatcagcagttcggcttcttacttctgtgcgaatcatgccgtggctcgtgtccagtttttcttccacttcttcttcttcaatcggctttgtaaagcttggccagccgcagtgggaatcaaatttatccttggatgtaaacaatggcttgcctgacacaatgtctacatacaacccttcttccttatgatcccaatattcattttgaaatggcggctccgtgccgttattttgcgttacttcatattgcatgcgatttaatgactttattttttcttctttattgtacgccatttatttagccccccaatgctcgctgataaatcccgctcgtccggaacctgtccggtagcgctgataatgtgctggattctttttataaaaatgctgatggtagccttccgcttcatagaaaggttcagcttttaaaatgtccgttacaatcggatctttaaagatgccgctttccgccagacgttgcttggaagcttccgcaagctccttttgtttatcattatgataaaaaatggctgcgcgataggaactgccgcgatcagcaaactgccccccggcatctgtcggatcgatttgctgccaaaataattcaagcagtttttcataagggaatacatcaggattaaacgtgatttgaacggcttcacgatgtcccgtcgtttcactgcacacctcttcgtacgtagggttttcagtatggccgcctgtatacccggacaccactttttcaattcccggctgttcgtcaaaaggtttaaccatacaccaaaaacagcctcctgcaaatgtggcgatttcttttttttcagacatactggtgcctcctttgttaatacgtggtattattatattatagcatgtaaaaatagaatgaaaatgattctgcttttcaataaaatctataggttttaagcaatatgcttatgtaatggaggttcacaaatttgaaagtaagaacacagatgatgtacgatatggaaactttactccgtaaagtctttaaacaaatacgcaatgaaatcaatgaaattttagataaagagctgtcgcggaatgaattcaccattcttcgaatccttagtgaacaagggcctaaaaaagtcactgaatttgcgcctattttagaggtatcggcaagccacattacggctgtgaccgatgcgctggtagaaaaggaatggattacgagaatcagatcgaaggaagacagacgcatcatccgcattcatatcactgaagcaggcgaaaaagtccttcagcactttaacgagaaaaaaacggaatatttctttaaacgctttgactgctacactgatgctgaacttgccacgttaatcgagctcttcagcaaacttgataaaaaacggtgaaaaaaagcacataccgatatataggtatgtgcttttcgcagtgcttcacttatttttcagtaaacagcttcattgctttccagcggccatatctataatacaaaaatgccgcgcagctgctaaataaaaaactcattccgattccaagcccgattcctttttgtccaagccaagctgaaaatagagctgtgaaaggatatctcaacacccaaaacgagattaaatttaataccagaacctgcagcatcgctcccgcggccctgacgattccgttcagcacaaaattaatcccaataaaagggtagaaaaacgcgatccacttcaaatattgttcaccaaatgcgaccgcatcaggctcactgataaataaccttatgagatatttaccaaatacccaaatcataaccgcaatcaccagcatgcaggaaataacagctatcacacccagccttgcaattgttcccactcttttttcgtttccgattccaatattttgccctgccatactattgacggccgtaccggcagccattgctggaagcgtgatgatgctatcaagccgctgcaccgcgccaaatcctgataccacgtgatccccgtatgagttaacaacactcataatcgccatcataccgcctgtaatcaccatcatctgcagacctgccggaatcccgagtttcaaaatcagcgcggactcttcccacttgggcattctcggaatcgagaatggcacaagcttgtgtttgatgacataaaacaacccatacaaaaacgcaatgccctgtgacaaaatcgttgaataagccgctcccgctattcccatgcggaacacagaaataaagagcggagcaagcactgtattcagtacaacagcaaacgcaataaaccggagaggtgtcttgctgtcgcccagcgcacgaagcacagtactgataaagttataaccaaacaaaaataaaatgccgataaattgaatctgtaaatacgtctcagcaagcggtatcattgactccggcgtttttagaagacgcagcaaaagctctgagagaaaaaaaccggccgcgccgaatccgatgcttaggcctgttaataaaacaacaaaagcgttaatatacgacgccattccttttacatcatcttttcctttttgctgagataaaatggttaaagtcgcattgttaaggcccaaaataaaagacagcacggtcaaaacaatcgtgcttgataccgcggctgccccaagggcctttgcccccagtaaattgccgatccacaagctgtctataaattgaaaggaaacctgcaatgcgtttccaagcataataggcattgaaaacagtacaagctgtttcagcacgttcccctgtgtaaaatcgtatgctttcatcttttctccttgtgttctcaaattttcttcggaccgcacgaaaaaagagacgttgtttcatgtctcttttttcatgacttatcggttttttttcggtctcgcataccgaatgtaaacaccatcacacttaggaacaaggcacaataggaaacattcaaatacatttgatccatgtcttcagcagccagatgatgataagcaagccagccgaagtacagggaaaatgtaaaggataataaactgaaatactggtaaatctttttcattttcagtcacctctattgtttaggatggtaataggaaaactcaatttcatctttttctaaatttatcttatccgctttgacatacattccattcgttaaaggcatttctgacaaacgcacttcaatgcttttatctccggggtgaacatggacaaatgacggcaattcataaaagctgtccatataatttaacacaaagctaattggtatactcaatttccctaacgaaaatttcgtgacattcagctctacatcaccgttttttttcacggtcggctcaaaagcgataaacgcatcaatagacgtggaaaatgccttgattttccctgcgacatgaacatcatcatcaatctctactttataatcaagcttatttgatgctttgtcgtttaaatatgagttaacaaacgcagctaatgattcttttgtgcttgtcacttgaaatccatactcgctctcagatgaatccttcacctgagcctgttcccccgggagcaaaacaagtgccacaaaaccggcggcgaggataaaattaattgcaagcaatataaaaaacagtcgcttccacttattcatgctgtcaccctactctttcggtaatccttcttttttaatggcttgatagacgcgctttgcgataagagaataacccgtaccattaggatgaaaatcatcttcctcagaaattcggctgctgtcccttttttgattgaacaaatcttcgatatgaacgatttttgcatgtttatcttttttcagctctttttcagcaatatggttccaatccgtgacgacaccatttatttcatttagttctgataatgtaaacgtaaacggattgtacatactgacataaatcagctcagcgtgatcattcagctcgcgaatttcagaaatgattttttcaaagcgcttttcgtacggtttttccgcttcctgaaacggttcaacggttaattgcagaaagttttggcgaaggattttcatcaaatcattaccgccaattgtaaaaaagacataatctgcgtcctttatgcctttttgaacctttttatcttttagtttttctaataaatcatccgaacggttcccttttacagcataatttttcacgtcgaccgttttgacttgtttatctgaccggatagaatccgccaccttgccgacatatccctttccttcgggatctccgactccttctgtcagcgaatctccgacagccgctatgacaatgtgttcttttgttttcgtttcatgggctttttgttttccctcagatgatgtacgtatgctcgtacacgcagtaagaagcaaaatcaaactggccatgattgaaaaaatgcgcagcttcaatcttgttgctccttcccattctactagtggaaagtgtatcatgttttagaagatttgcaaatgcctagtctcttagcttacttgagtgtactggctgactttacatcggaaatgatatcatcgtacggtgtattctccactccattgtaatctttcagcaccttaccgtccggacctaccaaataaaaagaagattgatgaatcacttggtcctctccctccggcttctttacgatcgctttaaagctcttaagtgcgaactcctcaatctcactctggctgtatccagtgagaaaatcccagttatcaaaagataatggataatttgcggcaaatttcttcagctgtttcggcttatcgttttctgggtcaacactaaatgatatgatgcggacatctatattttcggctttcaattttttttgcagatcggtcatatgagcggtcattggcggacatacagtttcacaattggtaaaaataaaatccgccagccatacttttccttttaagctctctaaagaaacgttcttgccgtcttggttttgaaatgtaaaaggctccacctcgtaattgagcggatttttaatctgctgtcctccgcatgcacacaaaaacagaaaaatcagcccagccgttaaccccttgataaccttcatgacatccatcctttccagccagcataaaaacgctttctaaaaccgtccttactgtcccatgtttgtattcgatactgagcaaaaaaaatcctgcatgcctccccattaacgattacaaaggagggcatgcaggtaaaaaacggcatgttacgcgttgtgctttaacacctcttgatgaaatacagcctgataatctgcccacttcatccggcgcttcatataatgtcggaaagaatacacttttgccctgctatttgatgaaaacacttcttttaagtagaattgcaaatggtgatgtaacataaagaaatagtgctcatcttcctttaatacaggtatttctgtcactttcacctgaatcccgtcaccgcgtttgaactctaggcttttgagtaacaagctatcaatcctcttttttgtttttcttctattatatatgatgccagccgggctgtctgtcattttgcgcggttgtgtaaaaaaattagattagcaaatggaacaagtcctcatccttgttcacctctacataatgaaacggttttttgttcatccgttcaatcagcggcccataatcggctttgttctgcagctcgatgccgacaagagcaggtccgttgcttttattatttttcttcgtatattcaaaccttgtaatgtcatcattcggcccgaggacttcgtcaagaaattcgcggagcgctcccgctctttgcggaaagttgacgataaaataatgttgaagaccttcaaaaatcaaggaacgctccttcatttcctgcattcttccgatatcgttattgcccccgcttaccacacacaccacgtttttccctttaatttcatccttgtacaaatcaagcgctgcgacagaaagagctccagccggttcagcaacaaccgcacattcgttatataattcaagaatggatgtacatacttttccttcaggcacgaggagaatgtcatcaacgacagtttccagcgtccggaaggtttcctcgccaatttttttaacagccgcaccatctacaaacttatcaattttatcaagtgtgacgacatgcccagctttgtttgattcaaagtaggatgccgctcccgccggctcaacagcaattacctttgtatcaggagacacgtttttcaaatatgtacctaccccagagagaaggccgccgcctccgacacttgcaaaaagaaaatgcggttctgtatcaatgtcgtttaaaatctcgactgcgagcgttccctgtccggccatcacatccggatcatcgaatggatggataaacgtccgagattccgcctcacagcattcagcagcgcttttatacgcgtcgtcaaacgtatcgcctgtcaaaataatatcgataaatccttttccgaatagttcaacttgagatactttttgtctcggtgtagtagacggcataaaaattttcccgtgaatgccaagatgtttacacgaaaatgccacaccttgagcgtggtttccggcacttgcacacacaactccgttctctgtctgctcgctggaaagctgtttcattttatgataagcccctctgagcttaaaagatctgacaacttgcaagtcttcgcgttttaaatagatattgcattcatatctctcagaaagtctgtcattcctctgcaaaggtgtgtgaatgacaacgtcctttacgttttggtgagccttcaaaatgtctttcacttggatgagagagttttctttaagcaacggtttcatgtacagattcctttcttgttttaaatccctatttaatatgccattataacatgaatattcaaaaaataagacaattatttttatttaataattaaaaaaatacagactatgtccaccacatcttgtggtaacttctgttcaaccattatcctgcagagccaagaaaaaagatgatcgtaaaataaagggtgttttcaaccaaaaggcatgatataatgaaaccaattagaaccaaaaggagccaattgatgaatagtgcaccaaaactcaatacatttcaacatctaatcggagaacatcaaactttcctggaagcgaagcgaatcgccaagcagttctcgttatcggagcttcctgtcttaataacaggaaaaatcggaacaggcaaaaatcacttcgcacatgccatacacttggaatcttcgagaagcaatgaaccgtttataagcgtcaattgcagcacccattcggaagaaacccttattcatgagctttttggccctaacggaaacacaggtgtttttcaaaaagcggtacgaggaaccctttttcttgatgatgtatggcgcatgcctgcttctgtacaagctcagctgttaaaagcgcttgattcagacacggagaaaccgcgaatgatctgtgcttctgcagaccgatctgtggaacatacattcaggcaagacttattctacagactgaacattttaacgctcacactgcccgaattatcggaacgaaaaagcgatattccgcttttgacacagcattttctctcaaattccggtcagcaattgttaatcgatccctccgtttttcccgtgcttgagaaacatgcatttgaaggcaatgtcagggaattaaaaaacgctgcagattatatggcggcagtatcaagcggaggaacgatccagccatatgacctgccgccatatattagaggcgcgatagacggaaaaacgtcgaagaaaaaagcgaagctgctgactttaatggaaaaagctgagtttttgtttattttggaaacaataaaagtattgaacgaaaaaggagaacctgccagcagacggatcatttctgaacacagcaaaaatacccaaacctcgttaactcctcagcaggtcagaagccgtctcgactatttggagaaaaaagattatgtcaccaaaagccgcggacgcgcaggcacaaaaattacctttgagggcttgagctttatagagacgttaaaaaatcaaatgatctagcgatcgaaaggagaatgcacttgtttacaatcaaagaagagatcgccaatgcgattacacacggcatcggtgtcctcttatccatcccagcattagtgtttctaatcatatttgcggctaattacgggtctgcatgggacattgtcagctttacaatattcggtgtctctatgctgctgttatatttgagctccaccctgcttcacagcatcacacataaaaaaacgaaggacattttggagattattgatcatagcgcgatttacgtactcatcgccggaacctacacgccttttttgcttgggccgctgaaaggcacactcggctttaccctgttggttatcgtatggtcacttgccctaggcggaatcgtttttaaaattttctttgtgaaacggtttatcctattgtcaaccttcgtgtatttagtcatggggtggctgatgattattgcaggtaaacctttatatgcttcactgagcggagcgggtttcagcctcctttttctcggcggcattttatactctgtcggaaccatcttttacatttggaaaaagatccccttccaccacgccatttggcacagctttgtattgggcgggagcgctgctatgtttttctgcgtgctcttctattgtgtaaaggtgccgttcctttcgtaacagtaacagaaaagcgcagtcttcacgactgcgcttttttttatgcacgtaattgtttttcattggcaggtatataagcttttgaaaaggacaattcaatgtctgccggttttaagcgtttaaaaaacgagcccttttgcatgttatctgttcctttcgtttccaccatcaccaacggaagatgatagcgggccgcaagttctacaggatcaatagaaccatctagtgaaagaatcaggctttgtcccttttccagctgttttgtcacatcttcatataccttttctgaatccccgtctgaaatcacatccatccgatccagccattgcccgataaaaggcaagcggaacacttttgggttggcgataaagccggccggttcctcaatatatccagcaattaaggccagttcagccaaacgcaaacggggatgcacatacaaaacaggaccgtgtggtattggctctggctgatggatcgtcacaactgaaccggagatgccgatacagccttccaaaaacgcctttggctgttcgtacacaagagtcatctgttttttgtatgacagacggggatcgagcattgtttgattaaataattgtttcatattttttaacagcatatacacaatataaaccactagaaggctgtagcgaaccaattaaaatcctcccgctttagaagaattctttttttcatacattagaaattcgtaatcatacgggtttttttcgtctttggtcccctgctcagaagaaaccaacttccaattggattcatcaaattcagggaagtgacggtcaccctcaaactcgtgatgaattttcgtcatatacagtctgtccgcataagggaaaaggtccgtatagagctgagcccctccgatcacaaagcattcttcagggcctgaacaaatgtccagtacatcctttaatgaaccgacaaccgtgcatcccggaaattctgaagccggcgctgaggtaacgacaatatttttccgatttggaagcggacgtccgatcgattcaaatgtttttcggcccataatgattgaatggcccgatgttactttcttaaagtatgcaagatcattgggcaaatgccacggcaaatcattgtctttgccgataagcctgttggcatccatcgcaaaaatgaatgaaatcatacgcttaccgccccttttatatgaggatgcggatcataatcctcgatgataaagtcctcaaatgcaaagttaaaaatagaatcaacctttctggcgaaacgaagctgcggaagcggtctaacatctctttcaagctgcaaattgacttgttcaatatgattttgatagatatgaacatcaccaaatgtatggatgaactcgcccgattcaagcccagtcacatgagcaatcatcatggttagcagggcataagatgcaatattaaacggcacacctaagaaaacatcggcagagcgctgatacaactgacaggacagcttgccgtcagacacatagaattggaacaggcaatggcacggcggcaacgccattttatcaatttcaccaacattccaggcgctgacgattaagcgtctggagttcggatttgtcttaatatcttcaataagacgggaaatttgatcaatggtttctccatcagctccccgccaagaacgccattgggagccatatacaggtccaagttcaccgttttcatcagcccactcattccagattcgcactccgttttcctgcagatagcgtacattcgtatctccttttaagaaccacagcagttcatgcgcaattgatttaaagtggagttttttagtggtgagcatcggaaagccttcccgtaaattaaatctcatttgatatccgaaagtgctgattgttccggtccctgtccggtcttcctttttctcaccatgctctaaaacatgtctgcataaatccttatactgtttcatttttttcatcctttaaaagtagtcttctagtagtgtaacacaataaaaaatcatttctgaacccagaaatgatttttttatagtcagctgacaacaggcttttcatcctgttctttttcttcatcttgcagatcctgatgcgtatgtgcaattctgctcgccgctgctgcagcaagagctgccacaatatcatccaaaaaggtgtgaataccgtctggactttcatcaagttccttaataattccaatcttctctttatccaaataaccgaaattggtcaaaccgatcgacccgtacacattaacgattgaaagcggaataatttcatctatgccgtaaagcggttcatctgtttcaacaaggtgctgcagcggctcggggagaagcttctgttctgcaagctgatcgagtgcaaggcctgtcaaaacagcatgaataatttcacgtttgttcaggactttttctacattctccatgcaaacactgagcggcagatttggattgtatttttcctgaagtttttgaacaatccgtgcaatatcttctatcataacgccccgtttgttcagcatatcctttgttatatcgaccatttcattcattgtgtactttttcatgtctaatggcatctcctttaggcactcatccagttgggaggcgtgttgcggtcccaataaatgctcccaagctcatgatgtgattgaaatccatcttctgctgtatgataatgaaaattaaaccagtagccgtcatgaggcgggtggtctcttcgcacatggaatctgagaagatcttctccagttgtccgattgtaaacgttgaaaattttttccgttttgcccgctgaaggcatgcttgagatcacaacatcttggtacgcctcatcatcttgcaatgtcgctaaataatcactaatcacattttcgatttttggcaggatctctttccgatagtcatcctcaatgacaggagcgattctgctgccgaattttaaaaaggactgatcctcagcgctgtcaaggagctgttccttgtacgattgaaaaagcagttcaggattttgcctgtcatccgactcatcatcgtacaggtcatgctcatcataaaaagcggtgtaatcattctgctcaagactgctcggctgtccggaaggcttgtccgccataagggcagccggaggagatacgagcccgaacgttacaatggtaaataaaaccacaagggtctttctcatccacaatttcatgactgcttattcctctctattttattgtcatgtttctcttattttagcacatccaaaacatgcaagtcatgtactatatgaaactgatatgcaaattaggagattcgttgctatgcactttgtgtaaaaacgcttacaatattccatgaaaggaggctttccgcatgattgacgctctgtttgccacagtttcactcttaacattattatactttgtcgtcatggaggtcaccgattaacagaaagcccgtgatatgaatcacgggcttgtttgaatgacgccataatggaacagtgctgtttttcttttcatgacgttaaaaccaaactgttcaaaccgcggacttttccagtggtcttttagcacaacgctttttctggcgactcgtaccgcttcattgatacatccttcgtgtaaaactgaatcctctgccaaatcacgtaaaggcgcgatgccgtcagaggtctctacaggttcatgaaacattggatcgaaataaaccacatcaacagagttgtcaggaagctgtttgatgtattctaagcaatcaccattcttcacctggattcttctcatcgcagcttgaagctcttctatacccgtttcccatgaatgcagccccgtcctcactaaaacagacacaagatggtttttttcaatcccaacaacagaacccgtttcgcctactgccatacttgcgataatggcatctgaccccagcccgagtgtgcaatctaaaaacgtatccccttcagataatccggcagcccgaagcataggctcttgctctccctgtaagaagcgtttggctctaaacatcgctgtattcggatgaaaaaagaatttggcaccttgtttcgtatacagctcaaaccgctctttgccgaccacaagcaaatcacgttcagctgacctcagcaggtgttcaaccgtttgtttattccggccgcagtatggcatatttagctctttagaaagctgctttgcggtttttatggtgtgttcagacggtctatagcttgttgttatcatcttctatactcccaaaaagaaaatgcccggaaaacgggcatttagcagtgcgcatcgaaggcagcagtcagatttttcatgatttcttccatatcgtgtccttcaatttcatgacgcggaataaaatgtacgacttctttgcctttcaaaagagccattgatggtgaagaaggctcctggccagtaaaatactcacgcattttcgcagtagcttctttatcttggcccgcaaaaacagtcaccgtattgtcaggtgttttgtcattctggaggactgcctgtgtagccgcaggacgcgcaaggcctgccgcgcagccgcatacagagttaacgactacaagagttgtgccctctgccttttccataaagttttctacttcttctgctgttgttaactcttcaaaacctgctccagtcagctcgcggcgcatcggtaagacaagctggcgcatgtattcttcataagccattgacataaaaaaagccccctctagtatccttcatctgaagtaaaggatactatagagagggccggatttcaaatgttcacgccttaaaatatagaagtaagtgtccccagctgtctagattttcataataccgccggtgttggcacttgtcacaagtttagaataacgtgccaggtagccggttttcactttcggttcaaaacctttccagttcgcttttcgtttttcccactcttcttctggcacttgtacatccaagatacgtttttcaatatcaacgataatatggtctccgttttcaacaaaggcaagtggcccgccctcagcggcctcaggtgatacgtggccgattgagaggccacgggaggctccggaaaaacgtccgtccgtaatcaatgccacttttggtccgagtcccattccaacgatttgggatgttggcgccagcatttccggcatgccaggtccgccttttggcccttcgtatctgataatgacaacgtcgccttcttttacttttcggttgataatgccgtcaagcgcctcgtcctgagaatcgaatacgacagccggcccttcgtgtcttgtaatcccattctgtacgccgcctgttttaatgatagcgccgtccggagctagattaccgaataaaacagcaaggcctcccttttcagtgaatggttgatccagcgggtgaatgacgtcataatcctttacttcatgtccggcaatggtttctccaagagtttttcctgtaacagtcagcgcgtctaaatgaagcgctccttctttcttggaaagctcattcagagccgctgacacgccgcccgcttcatgaagatcttcaataaacacatccgatgcaggcgccagcttggccaagtgcggcacgcgctcagcgacttcgttaatgcgttctaaagagtattcaacgccggcttcgtttgcaagggcaagggtatgaagaacggtatttgtagaacctccgagcgccatatcgagtgcaaacgcgttatcaatcgcttttactgtaacgatatcacgcggtttgatatctttgcgaatcgtttccattaattgcgcagccgattttcttacaaactctttgcgttccggagatgtcgccagaatggttccattacccggcaaagcaagaccaagtgcttctgacagacagttcattgagttcgccgtaaacatgcctgagcaagatccgcacgttgggcatccgaactgctctagttcttgaagctcgttttcgttgattttccctgcttggtaggcgcctaccccttcgaatactgaggaaagggagatttttcgcccgtcacttgttcttcctgccgccatcggtccaccgctgacaaaaatcgtcggaatgttgatgcgcattgccgccataagcattcccggtgtgattttgtcgcagttcggaatacagaccattccgtcaaaccagtgtgcggatacaaccgtttccacagagtctgcgataatttcacggcttggcagcgaatatctcataccgatatgccccattgcgatgccatcatctaccccaatggtattaaattcaaacggcacgccccctgcttctctgattgcttcttttacgattttcccaaactcctgcaagtgaacatgaccgggaacgatatcaatgtatgaattacacaccgcaataaacggcttgccgaaatcctcttcttttactcctgctgcacgaagcaaactgcggtgcggagctctatcgattccttgtgtgatcatattactgcgtaattctgccatggtgatcctcctaaattctttcaattgtttgattggattttattttgaaaattttcagtttatttatgagctgtttttgcaaataagataaattcaggccgccctcaccttgttttgttctttcgtgtttttatatttatatagcttttctttcgatttgaaccctccaactattaatattgttacttactataaatagttttcggatatttttcaacaatattcgaaataatttttataaaaagtgaattcacataaaaaaggtgcatgatctgcaccttttttatttctattcgcctttttttctgctttccgtcatttgtttccaaacagaaccttttgcttcttctccatgctcaatacgttcaagcgccattttgacttgaaggctgacctcaaattcggggtcatcttcggcagcgcgcaaagcttcaattgcactatcatccccgacttcgtacaggaacatggccgcacgccagcgaacaagcttgctggagtcgcttaacgacttgatcatagcgggaatggcttgaggatcgccgatatcagacaggcagtctccggccgttcttctgactgatacagctttgtcctcaagtgctttatacaatagaggcagaacatcaggtgtttcaatcattcctaagtacacaacagcctgtcttctgatggacacctttggatcatccaatgccttctgtaaaaccgggatatcctcttctttcggatccatctgttccaagtgtgcataacgctttttccagtcctcatcatccagcatgtcaagcgttactttatacgctttgcgctgtacagcttgttttgcttcgccctttccttgagcggctgcttcagtcagtcgtttcagccgttcatcactgtatgccgcctgaagctcttctgtcacgtcatggccgatttcattaaagtcaccgaacctgacaccttgttctttccaagcccgctcaaacacaacatttgaagcttcagatctaagttttaagatcgcctgctgaaagcgttcaggtaagccgaagcgttcttcccgctccccatcggttaatttaacttgcataggaatgccgctgaacatctgcacaaaaacttttacctctccaaaagattcttgatcagaacgattttcttctgcgctttcagcactttccatcccaaatgcagtgcggacttgcggtaaaatgtctttccagtcgtatcttgcattccgttcaacagcaagaaaatctgcgacgtgatatacccctttaactccatctattttaaggatttccgctataacaggcggtgcgccttctgcttgctcaggtttatagttattgcttttgcccgccggaagctcttccgttaagatgactttcattgtattcgggcttggtgtaggttcaattgattttatcttcatgatcgtcctcctatagcatatctgtgacttattctatcatagtcgctccaagccttctattacgacgttttggcatcaatcccggatatttctttttctaattggcggacaaactgaagcataaaattgtgtctttcttctgccagttcccgtgcagtgtctgtattcatcatatctttcagccgcagcagcttatgaaaaaaatgagcgtaggcgctttgatcatctccataaaggctatgcccgtttgcgcccgcaaacatgaaagctctcgcaatgccgacagcaccaatcgcatcaagtctgtcagcatcctgtacggcttttccctcaattgagagcggctccttcgccagcttttccctgtctcgaaaggacatccttgttataatatgaatcaccctgtcagcattctcttttcctactccgaaaaaaacgagctggtcatatacttcgttcacagaaagcctgaccgtgtcaggcagcttcacatcaattaaatcatgaaccaaagccgcggtttcaacaatgaacaaatccgctttttccttttctccaatatacgctgcaagatctgctactcttgatacatgatgccagtcatgtccagagctttcgtcagtcaggatagattgaacccatgtcctgatttgctctgcctgcttcaattccttcacaaaaacaccctctttattgctctaatagcttcacgatagcgtcttccagctctttcggatttgtatttggtgaataacggccaacgatttctccatttctatccactataaatttcgtgaaattccacttgatcgccttagttcccagcatccctttcgcatgttctgtcaaatacacaaacagcgggtgggcatttttcccgtttacatccacttttgaaaacataggaaatgtaacaccgtaatttgtttcacaaaattcctgtatgtcagcctcttcaccaggctcttggttcatgaattgattgcaggggaaccctaagatctccagcccctcctgctgatatgtatcatataattcctgcagctgctttaattggggagtaaaaccgcacttacttgctgtattcacgatcatcagtacctttcccgcgaaaggctgaagtgtcatgtctttccctgttattgtacgtacctttatttgataaatagacatgtaagtccctcctatgtccttggtgctgattattttaccttttttaaatcgcaattcaaaatgtaaacatcatttaagaactcataagtaatttgacgatatgagcgtccgttcattatcaattcatatggctcattttttatcttatcattctataaaacattacaattccctctgacatcatggaaaatcattttactgtgaaaccaaaaggcgtgtcagtgcgttttatttaaagagttttctgttgtttcccctcaacacgcatagatagattgaaaattggcgtgaaaattcctataatgaagaaaattaaacggggaaataatggaggtggcacgttgcctattaatataccaacacacctgccggcaaaacaggtgcttgaaagtgaacatatatttgtaatggatgaaagcagagcatttcatcaggatatccggccgcaaaaaattattatattaaatttgatgccgaaaaaaatccaaacagagactcagcttctcagattgcttggaaattcgcctttacaggttcatttcacatttttaatcccaagcacacacacgccgaaaaatactgcgagagaacaccttgacgaattttacacgactttttccaatatccgtcacaagaggtttgacggcatgattatcaccggtgcgccgatcgagcatttggcgtttgaagaggtttcatattgggaagagctcaaggaaatcatggagtggagcaaaacaaatgtcacttcaaccttgcatatttgctggggtgctcaagcaggtttgtactaccattacggtgttgaaaaaattcaaatgccgaaaaaaatcttcggtgtgttcgaacataccgttctttcaaaacacgaaagattggtaagaggttttgacgagctatactacgtgccgcattcccggcatacagatataaatatggaacagcttcaagcagtgcccgatttaaacattcttaccgcatcaaaggaagccggggtttgcttaattgtgtcaaaagacgaaaaacaagtctttttgacagggcaccctgaatatgatacaaatacgcttcttcaagagtatgaaagagatttggaacgaaacctttctactgtcgaggagcctaaacattattttgcaaaaggcagcaacgagccagtgaatcgctggaaagcgcatgccacattattgtttatgaattggctgaattattacgtttaccaagaaactccttatgaatgggactaatttttctttttttagtgatacgctgagcaaaaaatatgataaaatacatctgattcagtctgcgtataacaaaaatttaaaatactggaatccaaatcatttaaaattagcttaactttttcactgcattaataattcgattatgtatttgtgttatgtttatgtatagacaataactccttacgatgcatgaagcttgcttgttgttgattacattgaggtgaatttacttgaataccaataaaagagtattaattttgactgcaaattacggaaatggacatgtgcaggtagccaaaacactttatgaacaatgtgtacggctcggctttcagcatgtaacagtttctaatttgtaccaagagtcaaatccgattgtttcagaggtaactcaatacctttatttaaaaagcttctcaatcgggaaacagttttatcgtttgttttattacggagttgacaaaatctataataaacgtaaattcaatatttactttaaaatgggtaataaaagattgggcgaacttgtcgatgaacatcagcccgatattattattaatacatttccgatgatcgtcgtgccggaatacagacgccgaactggaagagtcattcctaccttcaacgttatgactgatttttgtcttcataaaatttgggttcacgaaaacgtggataaatattatgtggcaacagattacgtgaaggaaaaactgctggagatcggcactcatccaagcaatgtaaaaatcacaggaattccaatcaggccgcaatttgaagaatccatgccggttggcccgatatataaaaagtacaatctttcaccaaacaaaaaagtgcttctgatcatggcaggtgctcacggtgtattaaagaacgtaaaagagctgtgcgaaaaccttgtcaaggatgaccaagtgcaagtggttgtcgtgtgcgggaaaaatacggctttaaaagaatctttgagtgcgcttgaggcggaaaatggtgacaaattaaaagttctgggctatgtggagcgcattgatgagctatttcggatcacagattgcatgattaccaagcccggcggcattactttgacagaagccacagccattggagtgcctgtcattctgtacaaacccgtgcctggccaggaaaaagaaaatgcaaacttctttgaagaccgcggagctgccatcgttgtgaaccgtcatgaagagattctcgaatcagtcacttcccttcttgcagatgaagataccttgcatcgcatgaagaaaaacattaaggaccttcatttagcaaactcctctgaagtgattttagaggatatcctgaaggaatcagaaatgatgactgccaaacaaaaagccaaagtgctatcgtaatggcgtacttgagagcatacgaaaatcgtgtgctctttttatttatattcagccatcaataaaagcggttacatttttttatggaacttgcccttcttttgaaaaataagccgtttcgcaacttgacgggtgctcccagatggtgtatagttgaaccatcatttaacaatgaatcaaagttaaatgatgacaaaattttttttagcacatgggtgctacagtactaggaggaattaagcaatatgcaaaacggtaaagtaaaatggttcaacaacgaaaaaggattcggcttcattgaagttgaaggcggagacgatgtatttgttcacttcacagctatcgaaggagaaggatacaaatcattagaagaaggacaagaagtttcttttgaaattgtcgaaggtaatcgtggacctcaagcttctaatgttgtaaaactctaaactcaatacatgatgatgagatgacaaatagaggagaggcattcgcctctcctatttgattttcatctggatttcaatcgccaaaatgttttgtttgcacctctgttcaatctcttcaacatacttttccattgacggttttccttttttcgcgatatccgccagttcttctaaatcactgtatatttctataaatgttttgtgaaggatcaacttcaagtctttatcatccatagctgcgttccccttctctatcaagatacctcaaatagtaaaacagtcctatttattctggttcaatagttatatcggcttatttttattttcttttctattttggtacataaatttcaaaaaaactctgcaaaataatggcggaggtgtttttggtgacttcagaatttcataaagaggatcagactggctttacggataagcggcagctggaactagcggtggaaacagcgcagaaaacaacaggagctgcgacgagaggccaaagcaaaacattagttgactctgcataccaagccattgaggatgctagagaactgtcacaatctgaagagctggcagctctcgatgatcctgaatttgtaaagcagcaacagcagctgctagatgacagcgagcatcagctggatgaattcaaagaataaaaaccgcagcttctgcggtttttatttttagtgattggttaagacatctccgtattgtttcagcttttcaccaaccgtacatttattgatacaaaatgaatgcgcataagttttgccaaattctttgcgaaactgcttcttaataaaacagtccttgcaatattcatcgtgcagttctgtcagttctttaaagatcattttcttatccaatatcgtcatctccgttacggtctaatttcgtgtggctttctacgaattgatgggatagaatttttttagcgaggccgtcagcttcctgattgtcttttcgttgtattgtttcgtaggttggagtaagcttcagcgattcaaggagtgcttctattttgtcgagccattcattatgagatggatcataacaaggccagctgccgtcaagctgattcagcacaacaagcgagtcccctttgattgtaattgaatttctgcttgccccaagctctcttacttctcttattgcttcataaagcgctgcgtattcagcttcattattggttttcagccggaagcttttattttttctcaaacgatgccggattcctcccaatgaataatagatgacgatcccgagaccggccagttcgctctccttatcgaaactgccgtcaaaataaacagtaatgtcatcaggctcttgagcaagctcctctgtcagcttttccaattccttcagcgtccagctgccgcctttctcgtcttcgaactctagctctttcatgtatggaaaacggccaagttctctggcgagcatacgtgcctgctgtgctgtcagccagtcttcgctaaaaaatgagacggatcccgttccttttgcttctattttcaaatgcggtctgagcttcattacaatcaccttaccattcattagttgccgggcttatgctataatcaaaccaatcttaccccggaaaggaagctttttcatcttgtttaataattcgttttggatcttttttgcgatcattcattttatcattgttcttttattttataaaggatttggcaaaatgggactgtttgtttggatcggttttgcgacagtctgcgccaacctccaagtcgtcaaaacagttgaactgtttggcttaacagcgacactcgggaatgtgatgtatggcacaatcttttttgcgacagatgtgctgaatgaaaaatacggaccagctgaagccagaaaagcggtatggctcggattctcaacgctcctgacgctgacatttgtcatgcagggtgtgctgcttttcgaaccggcttccagcgacatatcacaaacagcgctggaaacgatcttcggattccttccgcgagttgcgttaggaagtctgcttgcctttatcttcagccaaacgctggatgtttatgtatattcggcaattagaaggatatttccttctgatcggcttttatggctcagaaacggcggcagtacagcagtcagccagctgtttgatacattcatattcactgcagtcgcctttctcggcatttatccggcaggcgtgtggcttcatatttttatttctacatatttgattaagtttgcggtatctttgatttcattgccttatgcttatgcagccaaaaaaatgatacctaaagatgaaaggagttcataatgcctacagaaatatacgtagacggcgcaagcgctggtaatcccgggccttcgggtattggcatttttatcaaacatgagggaacagcagaatccttctctattccaatcggagtgcatacaaatcaggaagcggaatttcttgcattaattgaagggatgaagctatgtgcaacgcgcgggtatcaatcggtttcctttcgaaccgattcagatattgtggaacgcgccactgagcttgaaatggttaaaaataaaacgtttcaaccgttcgtagaagaaatcacccgattaaaagcggcattccctctttttttcatcaaatggataccgggcaagcaaaaccaaaaagccgatcttctggcaaaagaagcgattcggctgaatgaaaagaattaaatcttgatcattggttcatcctaatggcgaggtgaactaacatgaaaaagaaagataaaggccggctgaccggcggtgttactccgcaaggcgacctggaaggcaatacacataatgaccctaaaacagagcttgaggagagagcaaaaaaaagcaatacaaaacgctagagaggatctaaacgatctctctagcgttcagcttttcaagcatacgctcaattcctttgatttggtggcggcgaagcatgtcagccgcctgctccatttgcaaagtaaataaagcgtctttcagtgtgcaggccagcggcactgagcaatgaatttccgcaagcttcctcgacatctccaaatcgcttaaaccttgctgaatttttccctgctgtccttttggaagaagagaaagattttccaataaacggtcaatcgtttcgtattcacgaatcagtttgtaggctgttttttctccaatccctttgactccgggatagttatcactggaatctcccataagcgctttaatatcaatcaaagccttcggcattacgcctgtttcttcataaaaagtctcttttgtatagactttataatttccgattcctttttgaagcaaagcaacgcttactttatccgttaacagctgaagtaaatctctgtcccctgttacgaccgtaatgtccgcttcattcgcaaataaatcggcaagagtaccgatacagtcatccgcttcatagccggcaaagccaatattcatgattccaagctctgcggctgcttcctttgccaaatcaaactgcggaatcagctccacaggcggcgcgctgcggttggccttataatcttggaacaagtcatttcggtacgttttgctccccatgtcccagcagcagacgacgtgtgtcggctggaatgtttccacagctgtaatcaaatgctttaaaaagccgttgacgccgttcgtcggcaccccgctgtcatttatcataaagttgcgatgtacggctgtggcaaaaaaggcccggaataaaagagccatgccgtcaaccagcaatagtttattattattcatcaaataactcccttttctttcattccttctattttatcataaagcagcccaaaaataaaaaacagtatctctttaattagagatactgtttggatatttatcaatcgttgtgtcttttgttgctggcgatcagcttttcagcttcgcgtcctgcgtaagagtcaaaatgggtttgaaatccgtttttctttttggcattgttattcgcctgtgcatttctgtttccgagctttgttctgcccaacatgaatccccccttacgtcggatgcatatagtatatgcttccggcaggaggttcactcgcgacaggatcatccagcttacatgcggcttacgtattctctgaccatttcttttgatacaagccgtcttgtcgggacgatgccttttttagcgagctgattcatttgctcggtaatttcattaattgcatctgtagtataaggctcatcgtttctgcatttagcaacagcttcttcaatcgccaattcacgcatattttcaagacgcataaatgctttgatatgctcgtgctgttttgatgaatgtgctgaaattgctttatgtacctctgacattaatcgttcatctcgcttttttctatttagtctatcatgacttgaaatacaagccaactgaattttacatttttattgtattgtctgaatttttccaggagatgcacgcctggtacgctatttcaatctctttcgcatgttccccttccgcatatcctcttaaatatgtctctttttgatccgttatttgcgcgattgctttttcacccatatcttcctgtaagcgtctgaggtgagctgtgtaatgagagatcaggctttcttcttcattttttatccatgcctctgtgattttcgtaagtttcatccgtacagcttcgataaaggccgattttcctttctgctcaaaaaactgcttcggtgatttgacctcttttagttcctgctcaaaagcacgttcttctatttccggttcaacttccttcaactgtatgccgttcgaatgctgatcacccgcataaacggaaaaataaccgtcctcgtttaatgttttttgaaattgatccagccattcttcattgatatgccgttcgatgaaaccgctcatgcgaacatcaagcgttttgatttcctgaatatattcaaattgatattcatgtaaggctgttgtcatcgccttactgacgttctttttccaatccccgttttgcagcccgggatgaaatgccgattttaataaatcatttgcaaaatatgataatcgctgtgtaatgtgatatagctgctctcttgtatctttttttactttttcaatgatggtttctgagttccgccgtttctcgatatcggccgctgtccgctcaaatgacagcataaggcgctgtttctgcgcttccttctcttctcgggactgatgctgggattggtgaagctgaaaaacagtttcgcatagtttgtctgcctccgaactgagctgcgctgctgacgctttttttacatccacttcgataaaccggtctaagtgttttcttactttcgggaactgattataaaatgactccggttttcccaccagttcctccttacttgatacggtaaagagctgcggctcataaaccccttcttttacaagctctgcgctgacataatcggtcactgtttcgagttctgttttatcttttgcaaggtctgcagcattaataataaaaaacattttatccatgctgagcgattctttcacaagtccaagctttcgcaaaaatgaacggtctccttttgaaaaagagtgctgataataagtcatataaaaaaatgcatcggcatctttgatatattggaatgccagttctgtatgccgtttattcatgctgctcgcgccgggtgtatcaacgatcgtaatccctttttcagtgagcgggcatgtataatagaccgttacctcttttacagcacaggccgttgtttcctctgctacatacggctttaattcagatagcggaatcgttaatttcttctgttcctgtatatactgctgatacttctcgtatgcaagcaggaaattgctgatcaatttcacgtgttcttcctgcagcctgttttttttgactgccttttcccacttctctgtgaaggaacggcctgccggttcctttggtattccggtgagctgcaaaatttcagccgttatgtcatcctctgtcttaaacactacatccgctgttttgtttaagttgccattgattggcattgtgatcttgttaattgtcgctgtggttggcgttggtgaggatggcagcactctttcgccgacaagcgcattggcaaatgatgatttccccgagctgaagcctccaaaaagagcgagtgtaaatttccgttcctcaagccttttcaccctttcacgaaacgctgaagtttgctttaacaacatgctgcattcgcttaaaaggtcagacaaagtgtaaaagcgtttgatttggtcttgaagcggcatttcttgttccattttgatttctgatttcggcatcggctgcgccgtcagctggcttcggccttgtttctgctctggagccgccactcttgttttcttcgatttaaaccattctgtgtctatatgcatggggcatgcggactcttcttcccaaatggcccacaggcgatcggttttctctcgggcattattctctaaacgcgcctgttcttgaagaaagacaagtttttctgattcttggacgagcctgtctttaattgtttgcacatctttggaaacacgctctttcaccatagcggagagcacctttatgatgtctgcggcttctcttttcgcctctttccggatgagctctgccaagtcttttgtatattgcaatacatattcagaggaaaaggctgcaccatgcttgaccgcgcgttcaatgatgcttatatcaagcggtgtgcgataggcctgaatcagcttttcactttcagcggtatagacatcaaataccttggcgagtttatgaagcgtgtctatcatatgccaatccgcttcgggctctgttcgttttgccacatcagagaaaaaagcattccgccttttatctctttcctgtgcagttttcgctttagaaaagaaaaagccggttttaaaggaaggctcttgtgattctaaaaatgcagccgccaattcacgcatttcaaaaggcgtcaggtttgcgttttttaaaatacgattgatttcttcctgcatcctcgtctctgcctcagtcgtttgtttttcggcctcattcaattgatcacgcagcgattggaccagtccaatttggatattaagctgttcagcgaaactcggagcgcctgtttcgtctttcttcagcatttccgtatgttcctttagcagattacggactttttgttcggttaaagcctgcatattgctttttgattgctgttctattcttcttaactcttctctcaggacccccatctgattgaacgggtggtccggttctgttactgacgtaaaatagagcgcttcctttgaaatcccttcattgcaaagcatctcctctacctgcgctttatagtctccaaatttcgtctccgtctcatcatggcggtcaatttgattgacgataaaatacacattcggaatgctttcttttattgatctgagaaactttacattttcctcagcgtgcacgtgattatagtgaacgacgtaaaacagcgcatccgcttggtgaagaatagaagcagccgatagaaaatgagcatcatctgttgaatctatccctggagtatcaatatacgcaaccccggaatcgatctcagtatacctgtcaaaaatttcgacgctttcaatctgttccccgtctttacaatattgctgcaccttgtctttctggtaagccccttccagctcagcacacgctccgtctgttgtatgaagccgaactcgcttttccccgtttctgatcacaacaaggttagcgcttgtcggaatcgggcttgtcggcaaaatattctccattaacaggcagttcagcagtgacgattttcccgctgaataatgcccggtaaacgcgatataaacctcttcatcagccgcttttttcatgaccgcagccagtttagcagccctttgttcatcttgattctcaataaattgcttataaatttccccagttttatgcaaaagctcttttctgttttgatctgtcataagtctgaacccctttgtgccgtttcaattgtgaacctttttcgaaagatctgaattcattcccttttcattttacacaagaataaaccaaatttctttaggagaatagaaaaaagccgccattacggcagcttctataaaagaaaatctgcaacttttacaagttccagattcatcaaacagatttattagagattccttttaatacaaaaccaattaatacactatatgtacaaaccgctccaagcaaaaacagcattgtcatttgcttcaccatcctgattgagaatctttttcaaattcattttaacatagttgagaatgattttcaatcgctattttatgctgtattcctgtaatgctttgtcttctgcgcgaattctgacgcttaacaacacggcattgaaaatggaaaacagacacatggtgacgtatgcttgataaagcagcggaatcagcaaaatttcgagtataacaacggcatagtttggatgtttcatccatttatatggacctttttttacaagctctacacctggaacaacaaggattttcgtattccaatatgcccctaaggaacaaagcgcccaataccgtacgatctgtacgcttaaaatcactgcagcgataccgagccaccagctggacggctgtttattcatcagcagcacttcggcaattaaggacaggaaaaaaaggatatgcatcgtaatgatatatggatagtggctctcgccaaattcaattgctccttgcttctttaccttttgttcgttttgcctggccactgccatttctgctgctctttgaacaatgagaatggcgatcatcaaccaaaacatgagtcaagcccccttttcccagctgaataatagcaactctgatgagaagcccggccctaatgcgccaatcagtcctcgttcatcttcctttttatgtccgttctgcagatggtctttgatcacatacaagattgtggctgaagacatatttccgtgcttttgcaaaatgctttgcgcagatgaaagcttttctgacgacagcccgagacttttgatgtatgcatcgatcactttttttccgcctggatgcgccaaaaaaacactgatatcatggaatgacagcttatgtttgtccaaaaaaatctgtacatttgttttgagccatttttccaccaaggtcggaatgtctcgtgagaaaatgactttgaatccttgatcggtaaagtcccagcccatgacatcttctgattgtttcatcaaaacagattgggcgtccattatcttcggcgcaagcttcagctttgacatcctgcggtccgccttctctccgcataataaagctgcggcaatgccgtcaccaaaaagcgaggtgccgatcagattgcttttcgttttatcttccggctggaatgtcaggctgcacagctcggcagcaatgacaagcacaaaagcctcaggatacgctttgcagtattcggctgcacgcgcaagtccgctggctcctcctgcacagccaagcccccaaatcggaatccgcttcgtatatggagaaaacggaagttcattcataagccgcgcctcgatactcggtgtggaaagacctgtactggagacgaaaaaaacagcttccactttctcataaggaatggcttcttgaaaaaattccggatgagagaggcactcacgaacagccgctctgctgtgtttaagtgtttcttctatgtatatttgatttttttcttcaaagctgtgcccctctttataccattcaatcggcttaacaaactgtctcgaatggatttgcccgtttttaaaggaggataacagccggtcaatatccttaaaagaatgctgaaacatatagcgggcgaactcggccgctttctcttggtttacattatacgcaggaagacttgttccaatggataaaataaacgccatgcgatcacctctttgcatacattgtgccgcaacaatcttttttatatgcaaaaaaactccgccgcggcggagttagactgctgttttttgttcagcgaggtcagcttcttgttctatttttttagctttagaaaaaaagttatatacaatatttaagacgactgcagtaaagctgcccgccacaatgccattcgttgtaagcagcgttaaggcactcggaagctgtttgaaaatatccggcacaacggtcacaccgagccccaatcccactgagcaggcaacaatcagcagattttcctgtttcgcaaaatcaatgcggctgagcattttaatcccgtaagcgatcaccattccaaacatcgccaccattgcaccgcccaaaacagcggatggaataatggtcgtaaaagcagcgatctttggaaacagcccaaatgccattaggatcacacctgtgaccacaatgacggcattttttttgatccctgtgagctgaacaagcccgacattttgagagaatgccgtataaggaaaagcgttaaaaataccgcccagaagcacagccagtccttcagctcgatagcctttagacaaatctttctctgtcaaacggcggtttgtcaggtcacctaaagcaaagtaaacaccagttgactccacaaggctgacaattgcaacgatggacatcgtaatgataggcgctgcatgaaaagacggcgcgccgaagtaaaatggctgaatcatttgaacaactgccgcgtccgaaacattatcaaattgaacttttcccataaaatatgcgatgaaggtaccaatcaaaataccgatcaaaatcgagacggacttgataaagccttttgtaaaacggtatagaagcacaatgatactcaacacggtaaaagcaagcgcaaggttggagagatctccgaaatctgcacttccttctccgccggccatgttattcatggcaaccggcatcagtgtaataccgataatcgtaacaacagagcctgtcacgaccggcggaaaaaacgatacgagctttccaaagaaaaatgaaataagaatgacaagaatgcctgaagcgataatgctgccgtaaactgttgaaaccccatattcagatccaatcgctatcatcggcgatacagctgtaaaggtacagccaagcactaccggaagcccgatcccaaaaaatcggttgctccacacttgcagaagtgtagccacaccgcacataaaaatatcaattgatactaaataagtcagctgctcgacggtcagtcccattgcttttccgacaatcagaggaacaacaatggcgccggcatacatggcaagaacatgctgaatccctaaagacagcgttttgccgaatccacttctcatgaatgaacctcctgtacgaaggacacttttccttcttctaaagactgaattcttgccaaagattccactcgatagcccagtttcacaagttcatctcttcccggctgaaatgacttttcaataacaatgccaattcccgcaatagaagctcccgcttgcttcacaatcgacacaagcccgtgcgctgcctgtccatttgccaaaaaatcatcgataatcagcacatgatcctgatccgacagatgggtcccagacactgcgatttggctttctgtttgcttcgtaaaggaataaacagacgctgtcagcaagttgtcggtgagtgttaacgattgatgctttctcgcgaagacaactggcacacccagcttcaagcccgtcattacagcgggagcgatacctgatgattcgattgtcacaattttggtaataccgtcttttgcaaacctggacgcaaattcgtcaccaattctctgcataagcagcggatcaatttggtgattcaaaaaagaatccactttcaatacctgatcagataatacgatgccttcttcctctattttccgtttcagtgcttccatcctgtctacctccgttatgagaataaaaaaagcattgcccgctcaaataaagagcaagcaatgctgatatcacaaaaaaccgtacacgtgcggttccattgctcacccatagtcggacatttacggtgcccggtagaaacttgcgtgccatatccacgcgaatatatgagtgttcctattatattgtaataaattatatcaagattctaatctcttgcataggctgaaaataaaaattcccgaactttaattttgtttttttagatatcattcgtatttcaaggggattcgatataaaagagcctgacgacgcgccgccaggcttttgattatgacagatagagatttgaatatttgtttgataaataatcaattaaatagcgaacattcagctcttctcctgttgcatctttaataatgtctaacggctttttccgttttccgtgaatgtgcaccttttccgtcagccattgctttatcggatggaactctcctctttccaagagagcgtcaaattcagggagatcctcaagcattttttgtttcagctgagccgcatacatgtagccgagcgcataggatgggaagtagccgaaatctccacctgcccaatggacgtcctgtaaaatcccctctgcgtcggtctgcggtgtaatccctaaataatcctggtatttttgattccaaagcgacggcagatcttccacagacacttcattgctaaaaatcgctttttcaatttcataacggatgatgatatgaagaggatacgttaattcatccgcttcgaccctgataaatgaaggttttgattcattgattgcccggacaaaatcatccagggagatgtccttgaactgttcaggtgatgcttcttgaatcttctgatagtacggtgtccaaaaatgcttgttgcggccgataaaattctcgtaaaataatgattgcgattcatgaattcccattgatgcgccgtctgacaagttcgtgccactgagtgcttcatcaatattttgctcgtatatcgcgtgcccgcactcatgaatggtgccaaagatcgccgtccggaaatctttttcatcatatctcgtcgtgacccgaacgtctccccggttcagcgtagttgcaaacggatgaacggtttcatcaagtcttccgccatcaaaatcgtagccaagctcctgtaaaaaatacagactgagctctttttgcttttctttcgggaacgcttttgtaagaaagcttgtatctggtttatttccggaagctgtcacctgtttaacaagagggataatcgcttccttcagctcagcaaacagctgatcaagcacctttaccgtgacgccgggctcaaacaaatcaagcaatgcatcataaggatgctcttgatatccccaatacgtaataaaacgtttattgaattcaatcagctgttctaaataaggagaaaacaagctgaaatcagattttcctttcgcttcctcccacgctgtttctgcctttgaacacagaattacgtattctttgtattcagcctcagggattttcttattctcttcatactcttttttcgccagttccactgcttttttcgtatcttccgacaagtcatcaaatcgttcatacaggacatcgataagctccttcattcgatctgatgtttggatattgaatatatctgttgaaagctggccgatgctttcggcacgatcctctgagccgtttttcggcgcgcctgttctggagtcccagtgcattaacgcaactgcttcgctgtaatgtgagattctttttaaaagatcaaaaaattctttttcatatgtatgtatctccatatccattccctccctattctagccgttccattacaggctaatggaagggggtatgaaagtcaaattgtttgtataaaaggctgccggtatgttttgcggcagcctttttattcagttgatcgtcatttgattttttggcggaggtgttcttcgctttttctgcttgatttttttatccacccacactgttgccagcggggttaagagcgaggtgacaataacgcttgtcgctataattgcagttgccgactcagcaactggcgcaaatgaggcattcgcttccgctaatgcgtatggcacggctacagccgcccctgccgtagaagaagcggccacacccgcgacaccgtctccccgcgcgacaaaacgatcaagtaaaaacaaggaactgcccgataaaatgacgacagaaactccgataaaaatgccgagcagccctgattggatcagcattccaaaattcaaggtattgccgagcgaaaaggcgaaaaatggaatgatcgccggcacaaccttgctgaataagtctctgagatcgtgatccagatttccaagtatacatccaagtaaaaacgggataactgtcgctgccagcgtttcccatgggaatgcggcaagtcccgtcacaccaaacgtcaccatggtcataaaaggaccagattctgtactgataaaggcgaaagcgcccgcatcctcttttcttcccatgtgattcatgagcgccaaatacagtccgccgttcgtttcattcattaccgcgacaattgctaaaacagaaaggcctgcaaaaaagccggattgtatgccttcgtcaggtataaattgcgctgcgatcacgccgagcagtgccgcaaatccgacctttcccaataataacgtgattccttttcttgcgatatagcctgaagaacgaaaatcaatcgttgctcctacgcaaaagataaaaacacccagtattggcagcgttccggtaatcaaagcacccgtaaaccctccaaagaactccgctgttccaggcgcaaacgtgttgagcgccgctccaagaaatagcggaataatcatcattcccccaggtacccgttcaattgtcgccttgattttcatattgtggattctcccatcctccggttatgaaaaaacaatttcacttacacttggaaaacagcctgcaaatcctcttttgaacagctgcccagctggctgccgactccgacggcgccagctccggctctaagccaatccggcacttcagacggatgtatcccgcctgtcggaataaaggtcacctgcgggaaaggacccgctaaatttttcataaacgggatgccaaacacaccgcttgggaacagctttaatgtcgtaaaaccgaatgtcagcgcttccataatttcgctcggagtcaagacgccggggatataatgtgtctttacaaaagatagatgttcagcaagatcagctgaaaaacccggactgacaataaactgcgcgccagcctcagcagcttccccagcttgctgcgcggtgatgaccgtgcccgcgccaattaaaatatcttccctattacggaaggattcgataatatctgatgccccgggggtcgtatacgtcacttcaactgcacgaatccctttatctaacaaactctcaatctgctgacaggcctcctgcgtatcctttgaacgaatgactgcaatcagctttgcttctttcagacggttttcaacgactttggactccatattaataatcccctttcttttggtgaaccgttctttgagcagataaaaaagaagctaatttctccctggtcggcaaaccgtccatatcccccggtgcctgcacttgcaaagcgccaatcgcatttcccctttgcaccgcatccttgtacgacaaaccgtctaggataccgctgattacaccgactgcaaatccgtctccggcgccgaccgtatcaaccacccggtcgacccggcagccttctagaaatccttcacttgtccccgttttaaagtaagcgccttcttttccaagtttaatagcaacaaagctggcaccttttttcaaataatagtcggcaatgccttcaggtgttttttctccggtcaatagctctccctctgcgatacccgggaaaaaccagtctgcaagcccagccagatcattgattgtgtgtaccattgttgcttgatcaggccaaagcgaaggtcttacattagggtcgaatgaaatggtcttccctgcgtttctcatgtcgttcatgacatgatacgtgaagtctttcatctcggctgacaaggcaggcggaatgcctgtcacatgcaaatggcctgcgcattgaaaataatctctcggatattcagctgaagttaatgtgcttgcagctgagtttttcctatagtaggtaacttgcgggtcgccttctttcacttttgacttcagcagcagcccggtgggattttcgtcctgcgagcggatcacgcgggacacatccactccctcttttttaagttcctgtacaataaacgttccgagctgatcattgccgaccttgctcatccatcccattcgaaacccgagtctggcaaggccgcaggcgacattgctttctgctccggcaagccctttagaaaaagtggatacttcatgaaggcctccatactcatttgcataaaacatggccattgattccccgaatgtcaccgcatcaagcttcatctcttcccaacctcctcttagttgagggcacctaggattaaagtgactttctcatgatgacttttgcctctaattcaatggtttgaggcgctcctttgtcaccttcaatcctttttaatacacgttccatcgccgtcctgcccatatcatgtgacggctgggcgatcgttgtaatacctggaccgatcagtttataccattccgtatcatcgaatcctgcaatccctatatcttgagggatgcgcaggccaagctcttccatacagctgatgattttcagcataatcaagccattcaaagccagaatcgcttttttttgctccggcatttccttgtgaaaagaacgaagcgccgccttaagctgctccttgtcctttacgtcaatttcaagcaatctgacaagcccgttcacattatgaaccgaagccattttctgatacacagctgctctttctgcacgagggctgatagaggaaatcggttcggtaaacagcgcgacatcagtataccctttgctgtacaccttctgaagaatctcttttgtgatccatctgttgtcagtcgttacggtatccagtttcagatccggcagtttccggtcaattaagattgttggaatttgctgttcagcaaaagcgcgcagtacatccttgttttcccctgttgcgtttaaaatcaagccctcaaccgaatgggcttctagctttaagagcatttcccgctctttttcaggactgttatctgtgttgcacaccataatgctgtatccatattgatcacaaacctcttcgactcccctgaaagcagcgaccgaaaaaggatttgtaatgtcagctacaacaaatccgattaacttgcttttttttattttcaaaccttgcgccattttactcggccgataattcaattctgcaattgcctttttaatgtttttcactttttcaggagaaatcgcgtcaatttttccgttaatatagcgggaaactgtcgatttcgaaactcctgcacattcagctacatctttgatggttgtatggcctgttgttttctttttcattcaagtgctcctgtatctcttatatttgaaaccgatttcaaaaccgttacaacaaaagaataccataattttaaaatttgggaagagtttttttaataatgtgtcaattcattattttttcgttgactcttttcactatttatcctaaaattttctttgaaaccgttaccaaaatattttcattcaagtgatgctgaaatcctaaccaagggggaaatataatggaaaatcgttattctgtacatcctgaacaagtaaaacgctttacaacagaggagcttcgcagtcatttcttaatggatcctttatttacagaaaacaaacttacgatgtattactcacatgaagaccgggttgtcatcggcggagcggctccagggcaaagtgaactgaagcttgatgcaggtgattttctaaaaacagacttctttttggaacggcgtgaaatcgggattattaatgtcggccagcctggtgccgttagagtcggcgatgatgaatatgtgcttcaaacaaaggattttctctatatcggaatggataatcaggatgtatcattttcaagcctgaacggggaaaaagcgaagttttacttcgtctccgcttgcgcccacaaaagctatccgacacaaaaagccgccctagctgaactgacaccggaccgccttggtgatgatgcagcgtctaatgtcagaagtctgtacaaagtcattcatcaggatggcattaaaagctgtcagctgatgatgggaataacgatgttagatcaaaacaacaactggaataccatgccagcacacgttcatgaccgtcggatggaggcttatctttatctggatcttgaaaaggactcaaaggtatttcatttcatgggccagccggacgaaacacgccatcttgttgttggaaatgagcaggctgtcctttctcccgcctggtctattcattctggcgcaggaacatcaaactatagctttgtgtgggcgatggctggagaaaattacacatttacggacatggatctcgttccgatggatgggctgaaataagatgggttatctacatgacgccttttcattagaaggaaaaacagcgctggtgacaggccctggaacagggatcggtcaaggaattgccaaagccctagccggtgctggcgctgatattatcggcacatcacataaaagcagcctgtctgaaacacagcagcttgtggaacaggaaggccggatatttacatcttttacattggacatgagcaagccggaagcgataaaggattctgcagctgagctgtttgaaaacaggcagatcgacatccttgtcaataatgccggcattattcatcgggaaaaagcggcagattttccagaagagaactggcagcacgtactgaatgtcaatctacacagcctgtttattctgacacagcttgctggcaggcacatgctgaaaagaggtcatggaaagattattaatattgcctctctcctgtcttttcaaggcggcatcctcgttccggcttacaccgcgagcaaacacgctgttgccggtttgacaaaatcatttgcaaatgagtgggcagcgtcaggtattcaggtcaacgcaatcgccccaggctatatttctactgcgaatacaaagcctattcgggatgacgaaaagcgaaatgaggacattttaaagagaattcctgccggccgctggggccaagcggatgatatcggggggactgcagtctttttggcatcacgtgcttcagattatgtaaatggacatattttagcagttgatggcggctggctatcccgctgacaaataaaaaaagctgacgaacgatcgtcagcttttttccattacatcatgtgcggttcaacaggcaagacctttttgacctcatcaatgatgcgttcattttctccgccagcgtaaatgtgaattgagccgctgtcttgattcgaacgaatcaggcgcccgatgccctgccgtacacgtaacaacatatatggcagatcaacttcttcgaacggatcttttttcgctccgttgcgcttcgctgtaaatacaggatcgtgtggcggaaatggcaatgaccaaatggtaacattcttcaatgcgtcaccgggaatgtcgagtccttcccataagtgaactgaacaaagtactgtttcctcttcctcttggaatttctctactaagctgctgatttcctcatcaccttcgaagaaaattggatacggcagctcccatgccgccgacagctctttaaactcgtttaattcttcaaaagaagggaaaagcaccagcgttcttcctttgtaacgtttgattgtttcaatcgtttcagccgttttttgttcagcggccatatctgtttttgcgtatagattaatactcatttgctcgtcataatcataaggggaatcaacagttaatgacaaataatcatgaatcccaagactgtcggcaatataatcaaacgaaccgccttctgacagcgtagcagaagagaagatataaggaattttcttagaaaacactttttcgccaagtacttctgctaccgttctcggcatcacgacaaaggttgattctgcttcctttttctccagccagctgatcgcatccttttgatatagagataatgaatacgccatttgttcaacatattcttccactactgacagttcgtattgatcaatcgtatacatttcagactcaaatacaagtgcctcaccgattttatcaagtaaacggcaaagctcgtccgccgcctttttgacacgatggtcattttttatttctaaacggtgtgaaccggctacttcctttgattcttcagaaagaacatagaaaaattcgtcgtttgcgagaagcgcatcttcaatcaattctgcaaactcttctctgatgtcattttgcagcaatcgttctaaaaacaattcaagagtagactgcttcactctataggttagcgctttttgcgcagcaaactctaacaagtgcccctcatcaaatacaactgcactatgatcaggcaagagcggcagctggccctctcgtttgcgtgattcttccgtccacacatgctccatataaaaatcatgggaacatatgattaagtccgttgacttgcgatagtaatctctggaaagtgtcagaccgcatctgtgtctcatatcacaagtcagacagtcctgaaacgagtcgtagcttacgtcagaccactcttcattcgatagatttgcgtactgcttacggtcgccatacggataaaagcgctgcatcgcctgtgactcgtggacaaatgacggtaacgactcataaagatccagccatttatcatcatcagaacgctgcattgttttttcaagcttcttcaagcataaatattgctcatgcgattttgacagccttgtatcaattttcagatcaagatgctcagccagcttagaaatatcgccctcttttttcactagctgttcaattaatgtttcatctgcacaagcgatgatggcgggtttgccgacataccttgcatagctgattgcaaaaagaagatataccagcgttttccccgttcccactccagcttcggcgaacatgacttttttctctttaaacgcccgctccagctgaaaagccataaatacttgctcgtcccgaagatcaaaccctttttcgggaaggatatcgtaaaacacgtcaccaatccaattgttcaattcttcataaaaattctttgttttcgttaaagaaaaaggcaaacgtgatgttgtcacctagttccaacccccaactattcgacattcagaccaccaataatatcattttccgctgatgaatacaataaaaaaacttggcaatgccaagttttttgcagtttacttacgattgatcacatgcgacgataaaaaaggatggtctgttgaataaatatgttctaccgctttttctaaattagtttgcgcatgcgaaatcatagacggagacgattcagtcccgagctccttcagctcgtttgctgttgcgtcaagcgccctttgaataagattaaaatgttcgctgttcagcatgagatcacctctgatggaaataatcatcattgtatgcgaacttttcattttatatacatgctttaccgcatgttatcaccgaaacatgcacaaactacacttgatattccgtctccggattatccgtcttatcaacaatattctatcagggagtgatgttgacatgagttatagaaaccgattagatcagcattctgaactgttccatcacaattggacgcggcctaaacgttctaagtctcaagtaaacggtcacactgaaatgtcccaaaccaacattatattgagaagcaacgcgaaagctcaccgttggtaacgatagaatagggctgaaagatgaaagaagacgcatgcagagcgtcttctttttatgcgttttctgttttcttgcgctgcggccttacttttgaccaatattgataataatccgttttaataaacccgttaaagagctttcgtttcttcgttgcttttctgccatatgcttcctcaaagttttcatttgatgtcagcatatacacagaccaagtatcaagcggctcgaacgccttccccatttctttgtacatctgctcaacggcttttttctcgccgagacgctctccatatggcgggttgccgacaattacgccaaattccagatttgtggtaaagtctttgacctgcatctgtttgaactggattagatctcccaatcctgcttcctctgcattttcttttgcgatttgaaccatgcggtggtctatgtcgctagcgaaaattgtaagcggctgatcataatttgccttttcttcgacttcaagccgcgctttgttccacagatctttaccgatccattcccaatcctctgaaacaaaatcgcgattgaatcccggggcgatgttttggccgattagcgccgcttctatcgcgattgttccggagccacagaaaggatcaacaaacgggcggtccggcgtccaattggttaattgcaccaaagcggcagcaagtgtttctttaatcggcgcaccgccctgatcgacacggtatcctcgtttgtgaaggcctgtccctgatgagtccagtgtaatcaaagcctgatctttcaataaagaaatttcgactttatactcggcacctgtttcttcaatccaatcattggctttgccggactgcagcttgagcttttcgacaattgcttttttgacgatccgctgacagtcgggaacgcttgcaagtgttgattttaccgattttccgataacagggaatttcccgttttcaggtataaatgagcgccagttaatcgctttcgttttttcaaacagttcatcaaatgttttcgctttaaaagaagcaacctgaacctttatacggtcggctgttctaagccaaaggttggcacggcagatggcaagtgcatcaccttcaaaaataactttcccgttatcaaccgtgcattcgtatcctaaatctcgtacttcctttgcgacaacagcttcaatgcccatcggcgccgttgcaattagtgtatacttcttcatcgtatcaccctgtcttttgaaacttttctcttttcaagataaaagctctccttatacgggagagcttgttttcatcattttaaatgtaagtggtctaacgttctgtaagccatgttttgttccgtcgtactgcaaacggctcatcacctcgtactcaggcggcaatcatctatctacagaaagcattctgtccttctctccgttgaattccgttaagaaggttcccctaccaaaatttgggtttctcgctcgaggggtttaccgcgttccactctcaccatttctagtgagacttcgtcactgtggcactttcaaggatactcagccatatccgaagacgtaggcttttttcctgccgtcagtctctaaagactgccctagcttatgacttcgctaggcacgaacactacgggcatctcagcaccgtgcgagcatggactttcctctacagattcaagatctgcagcgattacccgaacgttaagaacatgaattattatataacaactgtttacaatttacaagcgccatttttttcaagcgtgatcaatcataaagcttgctgccaaaaacgtgtttttctaagttagacagccgttttaaaatatcaaagtttgttgtgttagattgcacaggctgttttttgctggcttcttcaagctgttttttcagctgcagattttcctgctgcagttcttcaatttcttgatggaaggtttcataatccttaataatcatatctaaaaatttgtcaacgtcttcttgcttgtagcctctaacgcctgttttaaattctttttccaaaatttctttcgcagaaagctttactttatcagcaagcatctttttcacctcgtatcgtgaatcatcacatatattttttcagaaatctgtacggttgtcaaatttctctctcattgttagtagctgtcttcctccactgtcactctcaagtcatccattgtaataaagtagatgggatagccatcctgttcgcgccttttttccgctgtcccaagcatatacttaggggagccttccttttccgggtcatataaaagcagaagcccgtcggacttatcaatgaagaactgatttttttgtttgaattgaagcgggctttcataaggacggtgagtcaggcttgcttcatagtctgcctgagacagaactgcttcatactgttccttattcggttctttccagttcttttcctgctcgtaaaatggtgtgatgacagctacttttaagtcagggtattcctcctgcaaatcatatgcagcttctgccgcccacagctccgctccaagctggcccgaaattaaaatccattctaatccttcatccaaaaaagcaatcagccgattcttaatggctttttttatgtaatacagcgccttgtcatcctgcttaaatatcccgagttcaaacggtttatagcccgtaattgccagtactttcatcatttcacctgctttaaaaaatggggctcccgtgggccccatttgttgtgctgcattgtttacaccatcaagctgcacgttttccatactagtagtcgcagcaaggttttcctgcttgaaaatgctgatgcgtagccgggtcaacatttgagaaagtgtgtggaaagtagtgaacgtgctgaaaatgctggtggtttacgtttgttgtatgctgtgggtgaatgtgcggcacgatagtcttcgaaaacgtatggtgttcacagcaatgagtaggatggacaattggcgccatcatatgcggtctgcagtgatgcatgataaaatcccctttccataaactttattacaatactaagctatgaaaaataaggggtacatgttctgatgcaaagacctattttaaaagtgtgcaattaagctgtctttaaagtttgaaaacacaaaagcaatcaaaaataccacaacaaagaacaagtaaaaaacacccttatacataccaactctccctttaaaaataactaacgtcattttacaggattcgccgctattctacaacaaaatcaatgtgaattcagcaaaaaaaattcatggcgaaacaagtcgtcttttgcgctttcccggggaatatttaagaggaatatttcctcttcagccgggcaattctcacatgcagtttttcagtttctttctctgataagcatgccgcatcgctaagcaattgctctgctatttgcaatgcttttccggattcttttttcttatgctcaaaatatttcgcgagctctattacagcagcgtatctgcacttctggttttgcgagcgggacagcttttcccaaagcggcactgcttcttccaagcggttttgttttttgtacaggagcgataaatccagccgtgcactgtcctggtcctcaaacgatttttctataagcctttccaactgcttgatcgcttggtccgtttctttatgagccataaaccatttcgccatagcataggcttcactgtgttcttttggcgcatgtgattctgaaaggatttttttagacatatggatgtacaatgaaatgagtgataacacatccatttcattatgatgcaggacaccttttaaaagatccggctcttgcgccttgataaaatgaaagtaaagcattggcgccaagtagcccggtgtgtcttctagcctgcggatgccgagctcctctttttcaaccgtgccaagagatacacggtccattttgtgtttccacaggcgtctagctccatgcaaaagatcaaagtggccaaactccggaagcttcggaagtctgtcacggatcaaggtgtgccttgttttcacctgcggccaatcaaaggctttgccgttgtaggtcacaagtgatgtaatgtcaacctcgcttaaaaagctttggtacaaggcgacttcgttccccggtttgggcaaaagatgctgtttgactgtcactcggtcttcatatactctcgcatgcccaagcaaaaaaatggtattcccagctccacccccaagaccggttgtttctgtatcaaagaaaaagaggttgtttttgttatacccttttgctgacaatgtatgcgacaggccgctttgattccacagtgtgatcacttcttcaagctcagaaaagctgtataacccatggcggtgagaaagcggatattctacttctctgatgaggcaatattcatcttcgaagatgaaaggcttcatgccaaaagcctcccactcttctaaaaacgggatgtcatcaaagtggttttcttgtttgcctgcttctattttttgttctccttcgtcgagcgccatgtgctttttcatccgttggagtttcccttttaatgacatatccggcctccctccttacgacatttgatccaacagctgcaaaattctttcctttgcttttatcccttctatttccgtacctatacaagacggacagccgtcatgacaaggacaatgtgtaatcagttgtttcgccgcttcattaatgtctgaaaaacgtttaaagacttcctccgccaaaccgataccgcccggataatgatcatataaaaatatggttggcaatccggtatgggctgctttgatttgagaaacaacatgaacatcatttcgatcacacatgatatacacagggacaatatgctgcagcacattcgagatgccaagaagcagctgttccagtgtcttttccccgatgtcttcatccgctgttttgatttcgagccaagctgcacttgtatgcagttcttcttccggcaaatgaataggtccagacccaatattttcaaaagtggtcatttttatttttttaaaaatggtcggcagggcattgacagtgacgtctccgtagtgcaatgacgtacggcttttttctttcgttttatcgatttctaaaaccttcagctgaactgccaggtttgcatccgtataatattcgacatcgacttttctgacatacgcctttttatggtcccaatcgagcttctcaacttgatactgaacgccttcatgcaaataaatcgcttcatcatgcaaaagcgtcatcgcactaaaacggtccatttcaccgataatccttacatttgcaatatccgactgatcaactataacgacattttcctgggaggcggaacgcaaactgatgtttgaagcagggaacgactcacttgcccaatggtaccgttcgccgttgcggtgaagaacagcctcttcctcaagatactcaagaatatcactgacttccatgggtccaaattcttcatcagctctaaaaggaagctcataagccgcacactttaagtggtctactaaaataatcaaattctccggattgattcttgcagattcaggcgaacgattaaagaaatattcaggatgccgcacaatatattggtcaatcggtgttgaattggctaccatgataatcaaagattcaccgtgtcttctgccggctcgtcccgcctgctgccaagcacttgcaacacttccgggataccccgtcattacacacacttgcagctggccgatatcaacaccaagctctaaggcattcgtactgaccactcctaaaatgtcgccttctctcaggcctttttcgatttctcttcgctctttcggcagatagcctccccgatagcctctgattgattttgttccaatctcttttttcacaagctcctgaatatggcttaaaataatttccacccgaactctgcttctggcaaaaacaatggtctgcactttgtttttaaggaactctttcgccagttcattcacttctacggttgcgctccttctaatattcagcggtttgttcacaattggcggattgtaaaacacaaaatgcttgcgtccgctcggtgcgccgttgtcatcgaccagccgcatcggtttgcctgtcagctgctctcccaattcctttgggttggcaattgttgcggaagtacaaataaaaaccggatcacttccataaaaccggcagatccgctttagccgccggatcacatttgccacatggctgccgaacacacctcgatacgtatgaagctcatcgatgacgatatacttaaggttttcaaacaaactgacccatttcgtatgatgcggtagaatggcagaatgcagcatatcggggtttgtaatgacaatatgacctgcttttctcaccttttgtctgattgccggagacgtatccccgtcatatgtaaagcttttaatatcaatgcccatttcatcaataatttcatttagctcgctcttttggtcttgtgccagcgctttagtcggaaataaatataacgcccggtttgtttcatcttgggcgatggactgcaggactgggaggttgtagcataacgtttttcctgatgctgttggcgttacggtaacgatgctctctcctttttgcacatattgaaaagcggaatattggtgagtatatagttcatcaatgccccttttcgaaagggccgctttgattctctcgtctatactttcgggcataggccttgtttttgcttcccgaggctcaatttcatgccaattcacaacgttttcatttccttttaaatcagaaatgagttcagtcagtgatttctttttcattctttacacctctttgtcaagtacagtttaccgaatatttgtttgcatggctaggtgcaaattttatacagttgaataaaaaaagcaaggcatacgccctgcttatttcgctttgattgtaaggagctttgattcgcctttacgagcagccttttcgcctgccggcaccattgatcctacagcctcaccattcattataacgattgggatgactgtgctgctcgctttttcttttattaattccaaatcacatgtaatcagcgggtcaccgaccttcactttatccccttctttaatgtgggcagtaaatccttctccgttcatattgactgtctccagcccgacatgaattaacagctcaattcccgagcgagtccgaatgccaacggcgtgtttggtgtggaaaatctgaatgacttcaccttcagcgggagaaacgatttcaccgctagaaggttccacggctattccttctcccatcattttctgtgaaaaaacagggtccggcacatctgacaggtccattactgtaccgtctgccggagaataaataacctcttctgtcaccttttcctgagttttgcccattccgaataattttttcagcaatgtattttctcccttctcattcttcaaccgttatcccttcattcaccactatttaaccacactttcaattttgcttcaatttataacaacatctggcatagacgcataatctggttaaaaaaggcggtggcgaaattggaattctatgatgacaaaaagaacgaactgcaaaagaaagaagaaatcataacggaggcaatcgacactctttttcaatcctcagcgttcggcaaccttataaacggatttcagaacctaatcaactcgagtttaaaggatgtgcagacgaccatacatgtcagagaaagagatactgggctgtatatcgatattaccattccggcgacgtttcgagatggcgagatcgtcgttgatgttaaatcgaggtatctccatgtaacactccaagaaaaacagaaacaccaaaatgaggctacctttacaagcatgacaagaacggttcagctgccttatgaagttcgccaagaagatatggaaacgtcttggaacgagcagacaatgacacttttctttccaaaaaataagcatgaatgaacgattcattcatgcttctatcatttaaaaaagctggtaaatccctttattaaagatccgacctgattcattgcactcattacttgacctgtcgtatccatcattttattaaaatcaaattgcccatttgcttttttgaactgcgacataatgctttgaaattgcgaaggctgctgttgattaggccttgggataggataagggttagaaaatacaggcggctgcataggcataggctggatcggagcataaggctgataataatcctgctgtccataatgctgctgaggcagttgttgctctaaataaccgggtgcagcctgctgataatatccttgcatatgctgaggataataatagcccatttgccgaggatagcttcgagagctcccgttcattgcgattcccccctaaacacaacatatttctcttctatatatgtatgaatgacttctattgtttgtgtcacaagtgatgattagcatttgtcaaattgtgtcgaaagtttaaattttttaaaaacagaaaaaagtcgaatcattatggtaccatattttcaatacagatgagaggggatgcaccataatgaacgtatcatacttaagcaaacgttttgcagaaatgaagaaatatgaaacagactgtatgaataaactgatggactttgccaagttcctctatattcaaggacatctcagcataactgagtttcgtaacagtatgaaggttctcgaagcaaatggagcagaaagcccggcatatgagatgaattaacgtccggccccctataaaaacgaaaagaagacagccttttaccggctgtcttctcttgcaatttcatcctttactgcgtgcaatgtataaaggactgactcagtgatgtccttgaatcgttttttatgaatatgatgaacatatgattgaaggaccaattccaggaaattatcttttacggtctcaatttgctctttatgcacatattttggccggtgggcttttatcaattcaagagcaccctctgcccagcgggccgccagttcatcattctcttcaactgcaggctttatcatctcaaaaaaatcataagaatgattactgttttttccttcctgataccgatcagcgcctttttcagcaacttcaatcatttgctcggtcatttccagcaaagtttgtgatagcaatatctttcacctcaatgcctatcgtaccaaatttcactcgcaaattcagccgatgcggtataccttctcaaacgcatacctgtgttcaggcgattgatacagctcatttatacaaatatgaagatctatgatttcttcttccagcacactcaggcgatcattttccgtttcccgcatctcagcctctaatgcatttacagaatgattcaggctttgctcagctcgcgttaattcatcttctatatcagaaagcatacggagaatatctgtcttgcatacataaccggacattcgtgtacctccctttccttgtctctcccgcttaacattctttgctctcaaggctctttccttcctcatgacaaaactagaagcaaatcgccaaacaaacaggtattccacgaaaagctgaagttttcgacaaaaacacccgcaaaaattgtatgatcctcctccttaatgcaaacgatacttgtgaggaggtgccgtatgaaaacaagaccgaaaaaagccggccagcaaaaaaagactgaatcaaaggcaatcgattctttagataaaaaattaggcggcccgaaccgcccttctacgtaagaagcaaggaatttccttgcttctttattttttcagccactgctccaccgcaaaaagcgcatgaagctggcgctttttatgtaaataccagtctgtcaattcaatctgcttcggcaattcctcgcgcctaaagaacgttttctttatctttccatgaaaccaatctgttttcgttccgtctaatgagtggattaactcagggtagcatgtccttagcataggagatgttctttttgtaatcccgatcatcttttccatatcaaaacgggaacctgtgtgcggcactgtgtgcaaaaagtgataaaaagaggagaacaattctggcttgaacagcaattgagacagctgctttcccagccttatcctttcctccgcctttgaaaagcgtttcactgaaatgccgtaaaaaaacccatttgaggaaggaaaaataacggtgttaaaatgaaaccagtcacttaaataaaaaggaatcgtgtcaaaaacattctttttaaacgaaggattttgtataataggtgtttggatagtgttttgttcatttataatgagggcatacattagccgctccgtatttcgctcatgccaaaaacgggtccattcttccgacataaattgtgagacgccaaacacatgcagaagatgaaacagcggtttcccgactctttttgaccagtggtataaaagaagctgcggataggcatccgaaaaaataagccagttcgctctttcataggctaaaaagaaccatttttgctgtctctcacggagtccaagctgaaacagactgccttttaaatcagtcattgaccagcctgcattacgagaaacgaaagaagccaaaagcgaccatttgatttccggatgacggtcgtaaaatgctttataagcatttgttcttgaaatgttatccgcgttttttatttttgtctgccgctcaatccggctcagaagctttctgatgatctgttgttcttgcacgttcattcacttccgtcatgattagtttaataaggaggatgagaaagtgattcggtatcctaacggaaaaacatttcagccgaaacattcggtttcatcccaaaacagtcagaaaagggccccgtcttacagtaatcgcggaatgaccctcgaagatgacttaaacgaaacgaataagtattatctgacaaaccaaattgccgttatacacaaaaagccgacacctgttcaaattgtaaatgtccattatccaaaaagaagtgccgcagtgattaaagaagcttactttaaacaatcatcgacaacagactacaatgggatttacaaagggcggtatattgattttgaggcgaaagaaacgaaaaacaagacctctttccccctgcagaattttcatgaccatcaaatcgagcatatgaagcaggtaaaggctcaagacggtatttgttttgttattatatccgctttcgaccaggtttattttttggaagccgataagctgttttatttctgggacagaaaagaaaaaaacggcagaaaatcaattcgaaaagatgagttggaagaaacagcttatccgatttctcttggatacgcacccagaattgattatattagtattattgaacagctttatttttcgccatcatctggtgcgaaaggttgattaacgaaaggttgagatgttatgtcagatcaatttaacagccgtgaagctcgacgaaaagcgaacagcaaatcgagtccttcaccgaaaaaaggcaagaaacgaaaaaagggcggattgtttaaaaagacccttttcactttactcattctgtttgttttaggcgtagttggcggtgctgttatatttgccgtcatggtttctgatgcgccgtcccttgatgaaagcaaattgaagacgccttattcatcaacgatttatgataaaaatggaaaagagatcgccgaagtcggcgccgaaaaacggacctacgtctcgatagatgaaattcccgatgttgtaaaagaagcctttatcgcgacagaagacgctcgtttttatgagcaccacgggattgaccctgtccgtatcggcggtgcattagttgccaactttaaagacggcttcggggctgaaggcggaagtacgatcacccagcaggtcgtcaaaaactcccttctttcacatcagaagacgttgaaacggaaggtgcaggaagtatggctttcgattcagctggagcgcaattactctaaagatgaaattttagaaatgtatttaaaccggatttatttttctcctagagcatacggaatcggaaaagcggcggaagaatttttcggcgttacagatttaagcaaattgactgtcgaacaggctgcgacgcttgcaggaatgccgcaaagcccaacagcgtacaacccggtcaaaaacccggataaagcggaaaaacgacgcaacatcgtactcagtctgatgaaaaaacaaggatttatttctgattctcaatataacaaagcgaaaaaagtggcagtgaaagacgaaggcgtcgtgtcacagaaggaatatgaaaaagcaagtacaaacaaatacagcgcatttgttgaagaggttatgaaggaaattgatgaaaaatctgatgtcgatccatctgctgacggattaaagatctatacgacattagatacaaaagcacaagataaactagatgaattaatggacggagacaccgtcggatttactgaaggcatgcagggcggcgttacccttctcgatacgaaaaccggagaagtgcgggcgattggcgccggaagagattctacggttggtggctataattacgcgacccaagctaagcgacagcctggatctaccattaaacctattctcgactacggtccagttattgaaaataaaaaatggtcaacttacgagcaaattgatgactcagcttacacgtattcagatggaacacctattcgagactttgaccgttcctataaaggggtcatgtctatgcgtgaagccctcgcccaatcacgtaacattccggctctaaaagcattccaagcagtcggaaaagatgcagcagttgattttgctaatggactggggctcggattaaataaagaaaaagtgtatgaatcatattctatcggaggattcggagaaggtaatcccggtgtctctactctaactatggctggagcatacagtgcattcggaaataacggaacatataacgaaccgcattttgtgaaatcaatagaatttaatgacggcacgaagcttgacttaacacccaaatcaaaatcagcaatgagcgattatacagccttcatgattacagatatgctgaaaacagctgttaaaacaggtactggacagcttgcacaagttccgggagtggaagttgcaggtaaaacaggtacaacaaactttgatgaagcggatatgcaaaaatacaatatcgcacaaggcggtgtaccagattcttggtttgtaggatatacacctcaatataccgctgctgtttggacaggtgtagattctcaaaataagataggaaaaaaatctttaaataaaacagagcaacagattgcaaagcgcatcttcgcccagctcatcgccgatgtcgatgacggaagcggatcatttgagaaacctgacagcgtagtggaagcctctgtagaaaaaggctcaaaccctgcaaaactggcagggccaaatacgccaagcgataagaagctcacagagtactttgttaaaggcacagctccttctactgtttctaaaacatatgagaaagaagaaaaagaggaaacagctaaactgtctggtttaaacgtgaaatacgataaagacaatcaatctttaacgttaagctggaattacgacggagatgcgacctttgctgttaagcaatctgttgatggcggcagctactcagaaattcaaaacagctctgcaaaagaggcagtcatatcgggtgtgcagccaggatctgtgtacaaattcgaagtaacagccgtcagtgatgatggcaaaagtacagcttccacatcctatgaggtgccaaaagctgaagacgatgaagataaaaaagaccagcaacaaacggatgatgaaaaacaagatgatgagaagactcaggatgatacacaaactgatgattctcaaaaagatgacggtcagacggatcaagatcagacagatgattcaacaaacgatcaagacaaaaaacaagacaatacgaacaccaatccgtccgacaacaataaccaagaccaatcaaacgataacgataacgacaacagtaacaaccaggatacgtcggatggtgattcgaactctggtaagaatgattcaacaggttctgacacgaataaaaataaaacagacacatctaataaaacacaaacaaactcatcatccattgaaaaaacaaattaaacaaaaaagccgtcacctttggggtgatggcttttttggtacacaataaaaaacctcccgttttaacaggaggttttatcgattcatcgcatgatatttgtaaaaatgctttttcatttcggtaaacagctcatcaagctgaataaagcaatggtattgggtcggcttaagaagaataaattccactcgttcagcccaattaatcggctttgcgggatatgatttctccctcaattcttgccaatcgagcgatttcaccggctcacctgctgtccaatgtaacgaagccagcaaacacacaatgccctttaacatttcgttttggtcacatctcgattttcgtgtttgaaagactgggagaagtgatgctttgatgtcatcccacacttcaaataaaagcggaacgtatttcccgctgtcttcccatggcaaatcgccttgtaattccgtgcagaaatcaaaatacacgggattggtctgcaaggttttcttcatatccgaggaactcttctggccaagactgcgcaagtattgctcataagaagccaacacttcttttgcttgcgtcatcgtttcaccagtccttttttatccctcttctgcccttctctgcacaaagaaagcagcggacactccgcacagcgcggagattgggctttacagtgatatctgccgaagaaaataagccggtgatgcgtaacggaccagtcttctttgggaaccttgcgcatcagcgtcttttcaacttccagaaccgagtccttccaccggcaaatgcccaatcgtttgctgactctctccacatgggtatctacggcaatggccggcacaccaaacgcaacggataccactacgtttgcggtctttctcccgacccctggcagtttgacaagctcatcgcggtctctcggcacttctccgccgtaatcttcaataatcattttactcagcttttgaatatttttcgctttattacgatataaaccgattgatttaatatcctgctgaagctcttccagcggaacagccaaatagtcttccggccgtttatatttttggaataatgttttggtcactctgtttacaagtgcatctgtacattgcgcagataaagctacagccaccactaattcaaaaggattggaatgaaccagttcacactccgcatgaggaaacatgtcacctatcttgtctaaacagaattcaatttgttttagatttaacacgattgtcaccttttcactttattgttcaagccaattgtaaaaaggaacctgccttttatactctttttgcggttcattctgctttgcttgtacacgccggaatttttggctgtgtatttttgcctgctccacagttttaagcccgtttttcttccattcaaacaaaatccggtcaatgtagcggaaactgagttttcctgatagtacagcctcttttaacgcgtgtttgatcagttgtgcgtcatgctggtcctggtcctgccagatcgccagcgtttcacactccaaaggcgataacggccttgcgaactcttcctcaaaaatggtataaaggcttttttgttccccttctgcttttctttcctgtgtttgattctgtgcaagctgaatatactcgtacagcttgccccataaaggctgaagagaatatttctcaaatttgatgccgttttgatcctcgcattcttcaataaacagaaagcctttttgaataaacatccgcaatctgtttgtgcattcttcaacagaaattgacataccttcctgcagctgattcggtgtaggaaaatatgatcctttttctaaatgcattttaatttttaacagcagaataagttctgtttcattaagcccaagctgtttataatgcgtgagcagaagattggggatggttgatgttccctgctcctgcatatcaataaattgctgttttttcatcgtcacacctcttactgtaaaggattgtgattacccctttactgtaaaaagtctcccttgcaggagactcttttttgtttcatttgaatgtattacggatacagacggtttaacagtcttgggaacggaatcgtttcacgaacgtgaggcgctccgctgatccaagctactgtccgctctaatccaaggccgaagccggaatgaggaactgatccatattttctaagttcagcataccatttatatgcgtcagaatccagtccatgttctttaagacgcgattccaaaagttccatatcgtgaatccgttcagacccgccgatgatttctccatagccttccggcgcaatcaagtcagcgcaaagcacaacgtcctcacggtcagaagccggctgcatatagaacggttttaaggacgtcggatagcgagtgatgaataccggtttgtcataatgttcagcaatcgctgtttcatgaggcgctccgaaatcatctccccactcgatatcgtcaaagcctttttctttcagaaattcaatcgcttcatcatacgtaattcttgggaacggggctttgatttgctcaagttttgacgtgtctcttcccaatgtgtttaattcaattttacaattcttaagaactgattgcacgatgaaagaaacgtaattttcctgtacttgaaggttttcttcaaattctacaaacgccatttccggttcgatcatccagaattcgattaagtgacgctttgttttagacttttccgctctgaatgtcggtccgaaagagaatacttttcctaaagccattgccgcagcttccatgtagagctggccgctttgagacagatacgcatcttcatcaaagtactttgtcgcaaagagttctgttgtaccttcaggtgcgcttccagtcaaaatcggcggatccacttttacgaagccttcgttattaaagaattcgtaagtcgcgcgaatgatttcattacggattttcatgatcgcatgctggcgctttgaacgcagccataaatgtctgtgatccatcaaaaattccgttccgtgttcttttggtgtaattggataatcggtcgcttcgtgaatgacttcaatatctgtcacagcaagttcatatccaagcggagaacgctcgtcctctttgacaatcccttttatatagagcgacgtttcctgcgtcactgatttagctgtttggaaaatgctttcttccacttccgcttttactacgacaccctgaataaaaccggtaccgtcccgaagctgtaaaaacgcaattttcccgcttgaacgcttattagcgacccaagctccgatcgttacttcctcacctacgtgcttgtacacttggttgattgttgttttcaacatatttccctccaaaacaagaaagacattcggaagctcattgccccgcgaactcttttatcatcactttattatacccgctcttaactaaccgggtcaatgcagataaaaagcggcttttctgtcagccgctttttgatctgttagctatgtttttctacaaaacgcttgattctttcaatggctttttcaagaagatctaacgatgttgcataagaaagacggacattctcaggagagccaaatccggatcctggaacaatcgcaactttttcctcctcgagaagcgctttaacaaattcatctacatctttgaaaccgcaagattgagctgcctcttttgcatttgggaacaagtaaaaagcaccttccggcttcacacagctgaaccctgggatttctatgagctttgcatagatcgtatttaatctatgttcaaatgcttctctcatttcttccaatggctcagaaggcccgttataagcagcaatcgctccgtattgtgcgattgatgtcgggtttgacgtgctgtggcttgcaaggttcgtcatcgctttaataatgtcttcagagcctgccgcataaccgattctccagcctgtcatgctgtgggacttcgatacgccgtttataatgaccgtttgctctttcagtctgtctgacagctgtgcaatggaaacatgtttctttccgccgtatgtaagtttttcataaatttcatctgacacaatcaagatatcatgttcaaggcacacttcaccgagcgcagacagttcttcttccgtatacatgacaccagtcgggttgcttggagagttaataacgattgcttttgttttttccgtaattgcatttttcagctgctcaggcgaaattttgaagtgattttcctcaagcccttctacataaacaggctttccgccagcgagtttcacctgctccggatagcttacccagtaaggcgttggaataataacttcatcttcttcatccaaaatcacttggaaaagggtatacagagcatgtttggcaccagtgcagacaataatttgagacggtttgtattcaatattctggtcgcgtttaaatttctctgcaatgctgtttttcagttcagccaaaccaccggaaggcgtgtatttcgtatggccctcgttcatcgaacgcacagcggcatcaataatatgctgcggtgtattgaagtcaggttcgcctgctcctaagccgatgacatcatggcctgcggctttcagttctttcgctttcgctgtgattgccagtgtggttgatggtgttaatgcggatactcttcttgccagtttcaacttgaactccccctaattcgtcttaaggcgtgatatttttgagaatctttccagttgtaaagtccacataacttaaactgtattgcccttctttgtctaagtacgtcacttcccaaagcaggacgtttccttctcttgccagatgaacctctttttgctttgaaaccagcccttcatcctttatgattttcgccgctttgtcttcagagattccctctttcgcttcttttgagagaatttttgcttttttatcagcaggaacccagacatataatgcagtgccttttttatccgttccctttacaacataatatttttcttttccgacaaatgtttcgacttgatcaacattggcgagatcggtttcttttttagcttcagcagctgctgcttcgtgcccctcttccttttgtgccatggctgatttataaatgcttgccgagacaagaagtactgctaaaaaaataataccaaaaatgacggtaaatattaatgctttttttctcatcttctcacctacgtacgataaatggtaaaaacggcttggtttttgttttcttcatccagtgcaaggccgaacatcagattttctcttttcagtgtacgattcaatgtgtccacaattttatacagatcatcagaatgctctacattaattgttgaaagaatttcgattttactttccattttttcatcctccagtttgaacaaatattgtaagtcatactccatttcaggacacgccatactagtatcacagagcgggaaatccgcttttaaataaaacaccatcctactcccacaccgcaaaagccgctttatgcggcttttattctttttcccctgcaacataagcttcaagctcgctgtcagtcatttcggatactgaggttgtcggcaaggcatcaagaaacagccggccgtaaccagcggttttaatccgtctgtccaatataataatcgttcccttgtctcccgcagaacgcagcaagcgtccgattccttgcctgaaggtcagcacagcttccggtaatgacactgtttgaaacggattctttccttttttgcgggcaagctcacattttgcagcatgaagcgggtgatcaggggaccggaatgggagcctcacgatcattactgtcgtcagctcatcaccagggaaatcaacgccttcccaaaaatgatttgttccgagcaggatcgcctgattggatgttttaaaagtcttcatcagcttgccgggacttccgcctgtaatcccttgtgccaagagctgaatgccggaagcactcatgttatgcttaagctcctggtgaacctttttcagcatatcatgggatgtaaacagcacaagaattttaggctgtttttcctttgccatcagttcgatataacgggctgtatcctgtataaattcaggttgccctgtatcctgaattgatttcatttcctttggaatcatcacctgcatacgctcatcgtaagaaaagggtgactcaattctcattgtccgcgggaaaaagtcactcagtcccagtcgttcaatcataaattgaaaagaaccttcgactgtaagggttgcagatgtcagcaccacactatttttgcgcgcgaaaaactgatcagccagaagttcaccaggttcaagaggctgtgcgtaaatggccactgcatttttcgcaccctttgcatctatttcaatccaaaccgcttcatcatcatcagacccaaagaagagcttctgcaacgtctgacagtaatgctgcaagcctttcatgcttctttggtattcatcggctaaaaagacggttttgctcttcatacccttcaaatgtttttccatcagggatgactgcgcctcaaaaagctgctgcaaatttgtcagcatggaacaaagcctctccgcaccatccgttaagatcgaccagcttttatcctggctttctttgttcaccttaaacactagacggtttaagtcttctttaggttttcttcgtttgacaaaagaatgtacagagctgaagaaagcatcactttctgcttgaacgtgctgaagccactcttccaattcgaaaaatgaatcaaccggcaggctgtttcgctggaatagctgtctcatcttttttagaagtccctgctccttcagagtgccgattctgctcaatttcgtatgcaattctatgtacgtggctcttttccctaaatgttcgcttgccgcacgttcaaaatggtgtgcttcatcaataataaatgtcccgctttcgggaagcctttttttctggctgccttcatcggtcagcaaaagggaatgattggtgattaccaaatcggagcgcatagcaatctgtttggcccgctcgtaaaaaccgatcacatgctcactgcgacttcttttataggagtcatcgtcataagccaatctgtcccacagcaattttccgcctgaaggcaaattcagttccgctacatctcctgtatttgtctctgtcagccaaacaagaagctgtgcctttgtcagtacggcatcataattatcatcttcttcatgaagcacctgctcaaatttatacaggcataaataatgcgattgcccttttaaaatcgccgctgttaccggaaatggaaacagatcttggacaatcggcaaatcctttgtgagaatctgctgctgtaaaagcgtcgaatacgtgctgattatgaccggcttttttgatttcttggcaaaaagcgcagccggaataagatagccaatcgtttttccgatgcctggaggagcttcaatcagcgcatgctcacgattggcaaacgcatcagccacctctctcatcatcatcatttggccgtctcttttttcatacccaggcattaactctgacagcgctttttcatttcccgcttcccagctttcgatctcaaatgagaagttctcgtcctcatttatacgaacatcgatagcttcaggttctctgacagaaaacgaagaaaagcgcgtatagcccggtatctcggtatgtctgttttcattaatgaacatatccaacaaatgcgtcagatcactgatgaaatgctgcgaaagccttcttaactgctttaatgtcggataaggaagctgccgcagcttttcaaggatttccaaaaaaataagccctgtcacttcagcatcgctgtcagcccggtgcggctgatcatgccgcagctgaagctcctcgcttaattccgtcagcttatacccttcaaatcccggaaaaacaatgcgtgagagctcgacagtatcaagcacttcacaatctgggagctgaaagcccgccttatgtagctcatacttgacaaatccaaggtcaaaatggatattgtgggcgacaaaataagcgccgtcaagcaattggaatacttcttcagcaactgcttcaaatggctgttcattttctaccatttgattagagattccagtaagctgctcaataaaagcagggattgatttatttggattaatgtattttgaaaaccgctcagtaatttgtccattttcgattacaaccgctgcgatttgtatgattttatcgcctttcttcggcgaattccctgttgtctctacatctataacaacgaaccgttgcttattcattaaaatggacacctcaattcttgcatacgacaaaagtgtaacacgttttgtacggaaatggagcggcaaaaccgttttactctcaaaatcttaaaagaaaacccccgataaagggggcttttcttctacaaaattgtacgggcgggttcgtttcccagcatttgttcaattttgttttgatcattcagaacagccactttcggctcgtggcttgccgcttcttgatcagacatcattttgtaagaaataataatgaccttatctccttcctgcacaaggcgtgcggctgcaccgtttaagcatatgacaccgcttccccgtttaccaggaataatatacgtttcaagacgtgctccattattattattcacaatttgtactttttcattaggaagcattcccacagcatcaatgagatcttcatcaattgtaatgcttcccacatagttcaggtttgcttccgtaacagttgccctgtgaagtttgccgctcatcattgttcgatacatattatattctctccatttctcgaatatcaataatgatgttatctattaaacgcgcttttgaaaaagcaactgcaacagcgagaatcatctttccagcaatttcattcacaggctcgagttccggataggaataaagctctacatagtctatggttccgctagtcgtttcaatgatttcttttgcagcttttatcaccgcttcaggatctctttcaccggcttggatcagttccgcacttgtttgaagggcccgatacagcttaggcgcttcttttctttcctcagctgttaagtatacattgcgagagcttttggctaagccgtcttcctctctgaccgtatcgacaggaaccaattcaatatccatgaagaagtcactgattaacccatcaacaacagctacctgctgcgcatcttttaaaccgaaataggcacgagtcggcttgactagattgaaaagcttcgtcagtacgatcgcgaccccgtcaaaatgtccttctcttgagcgcccgcataacacgtctgtgcgtctttctacatgaatcgtgacattcttttcaccgggatacatatccttagtatctggcgtaaaaagaatatcaactccggcgttttctgcaagagctgcatcccgctcaatatcgcgcggatatgcttcaaaatcttcattagggccgaattgtgcaggattcacaaaaatactcataataacggcgtcgttttcttgtcttgctttgtctgctaaggttaaatgcccctcatgcagaaaccccatcgtcggaacaaatccgattgacttgccctctgaatggtattgttttatggcttctttcagctgtgtaatatcagtaatctgtctcatcttattttcccccgtacaagccgtcaagcactgtctggttcatttgaaaggaatgcttttgttcagggaaagcacgatgtcttacatcctgaacatatccgctgattgctgtttcgatggtttcatcaatgcgcgtatattgctttacaaatttaggtgttctctcaacaccgtggccgataatatcatgataaacgagaacttgtccgtctgctttcacaccagccccgattccaatgaccggtatgcttagcgtctcggcaattttggctgtgagttctgccggcacacattccagcacaagcatcatagctcctgcttcttcgcattttatactgtcttctattaattttttggcgctttgttcgtctttgccctgtactttatagccgcccagtacgccgactgactgcggtgtcaaacctaagtgactgactactggaatgcctccaagcgttaatgcgcgaatggattcaaacacgccttctccgccctcaagcttcagtgcgtcagctccgctttcctgaacgatagccgctgcatttttcagcgtatcttccttggacaggtgataagacataaacggcatatctgtcacaataaaggtattcggcgcaccccttttaacggcttttgtatgatggatcatgtccgcaactgtcacaccgacagttgaatcaaggccgaggacgaccattccgagtgaatcaccgactaaaatcatgtcaactcccgcttgttcagcaagtttagctgccggataatcataagcggtcagcatgacaatcggttcttcagactccttcatttttagaaaatccagttttgttttcatgttttctcctcctcatgtttagaggagatgatctgccgttttcttctgcaagccaaaaaaccttccgttacaacgagaaggattcttcactttctaaagttcggcgagtttcatccctctgtcccagtccttttttggatcaaggcagactgctgcaatgtctatctattttaacaataggtgcagttcgcaggcgatactgcccaatggaagtataccaaaatcaacgggcttgtaccaacacattagcccaattcgatatcggcagagtagatttttttaatgccttcgttcgtttctaaaagcagaacgccttcatcatctatacctaacgccttaccgtaaaaggttccgtttaacgttctggctctcatattagtgctaataccgagcgcatagctttcccataaaagcttaatcggcgtaaatccgtgcgtcatataatcccggtaccgtttctcaaagcatagtaaaatatgctggatgacgccggcccgatcaattttttccccagcagcttggcagaggcttgtcgcgatgtccttcaattcatctggaaaatcattaggctgctggttaacgttaatgccgatcccaatgatcactgaacgtacgcgatcttcttcagcctgcatttccgttaggatgccaactgttttttttccgttaatcaaaatatcatttggccatttaatatccgtttggatgcctgctgcctcttctattccctgcacaacagctactgcagcaagaagagtcagctgcggtgttttttggagcggaatgtcaggccgcaaaatcaggctcatccaaacgccgtttccttcttgagaatgccataccctagacatccggccccttccggctgtttgtttgtcagccaccacgagggtgccttccggtgcgttattattcgcgagctcatgagccgttttttgcgtgcttgaaagaacgtcatggtaaataagatgctggcccatcacttccgtttttaatccaaaacgaatttcgctttcactgagttttccgggttttttgatgagccgatatccttttcttctaacggcttctacttcataaccctctttccgaagctcttcaatatgcttccacacagcagttcttgaacagccgagagcatcactgattttttggccggaaataaattcattgccggcctgagaaaataattcaataaggtcttttcttaatgttgaccgcatgtcttcagccactcctctatgtgtttcttttgattggagagcttccctgtcacaacagcctgctcgatccgctgtaattcttccgacacccattttccagccggccggtttcgaagcgcaagcaagtccttacccgtgatatcaagatccttaaggcttttgatcggcaggttttgataagcgtactgaatgtccttcagtttcttttcatccagtttttcgttttgccgaagctgcgatactttggccgctgagagcagtgctttttccccagctctgtacattgtcattgcgtcaaggctctggccaaacgtatcggcaatgtgaatggcttccttaatcacttttcccgggagcttccaacctttcaggaaaaggggcgcgtctttcaagactatgccaaggttaattaaaagagcagcccaaagctcctcacgggatgttaaagagaagaatggaaactcactcgttgaaatcaggttttctcgtttatgataaaaaccaggaagctcttcatacaatctcgtttgaatgagtgtttgaagcgcctggcgagaagctcttccctgcagcaatttctcgaactctatagtttttcgttcgactgaaacatgggagaggagtgatttttctttcgcaatggcttcttctgtttccggtgaaagcgtaaagccaagctggctcataaagcgtacggctctcagcatacgaagcgcatcctcttgaaatctatcctcaggctttccaacggttcgaatcactttctgatcaatatctttcttgccgccaaaataatcaagcaccttcccgtccgctgtcatggccatcgcattgatcgttaaatctctgcgttttagatcctcttctaatgatgagataaattgcacttctgacggtcttctgaaatcaacataatcagattcagtccggaatgtcgtgacttcataggtttcatcctcccagagcacaataatggtcccgtgctctttgcctacatcaacagtccgctgaaacagccgttctacttgatcaggtgccgcatctgtcgcgatatcgacatctccgatcgttcgtttcatatagctgtcacgaactgcgcctccgacaaaataagcctgatggcctgcttcgattaagatgcggagcacgggaagtgctttgataaaaactttttccatgtgatcactccggttctgctaaatcggcataaatctgttcatactggctgacaatttttttagaagaaaattcattttcaagcatctctattgccgcctttgtaaaacgattgcttagctgttcatcttctaaaatgctcatcgcgcgggctgttgcggccgtaacatcaccgacatccaccaaaaatccgctcacattgttttttataacctcagggataccgccaatgtttgttccaatacaaggcactccgcaagccatcgcttcaagcaggacaaggccaaagctttctttttcagatagcagcagcttcaaatcgctaatagaataaagctcttcaacacggtcttgatttccaagcattaagacttggtcttccaagccatattttctgataagctcgcaggctgtcgatttctccggaccgtctccgactaaaagcagcttcgctttcgttttgccagcgatattgcggaacacacggatgacatcctgcacgcgtttaacttttctgaagttggacacatggatgacgactttttcatctggtaaaattccatgtttctctttaattgccgctgtgtttttcttcagatacacgcgctcgtctataaagttataaatcgtttcaatttttttctccggtttaattaaatcgtacgtttcagccgcaagcgctgaggagacggccgtcaccctgtctgatgactcaatagcaaaacggatcagatcttttagagacggatcataacctaacaccgtgatatccgtgccatgcaaagtggtaacaatgccgatattgcgtttcagcatttgttttgcaagataggcgcaaacggcatgcgggagagcatagtgagcatggataatgtctaaattctcccgttccgccacctcagcgattttgcttgccaatgtcaaatcatacggaggatacttaaaaacagcatattgattaacctcaacttcatgaaaatgaatattgggatgatatgtattcagtctaaacggaatgcttgatgtgatgaaatggatttcatgtcccttttcagcaagctgcttccccagttctgtcgcaatgatacctgagcctccaacgctcggatagcatgtgattcctatttttagttttctcattgttcgcccccaagcacatcatgatcaagcatcagcatccgtttggaaaagaaaccttcggcatactccacgcccgcttctttaccgtaaagcttttctctcgcttcaacgatttcaatatacccattcgtcagaggagtagaaacggaatcctttgacgggataaactggcttttgtaggcgttgaggctttgtttctttgcctctattgtatccgagatatcaataacaaaatccggctgatgaaaaccatttatcatataatagtaaaccttgctgactttatgcgccggaaggcttttttcgtctttatatttatggattccggcggaaaagatcgcttcttccaccagtgcagccgcattggcgtgatccggatggcgatcctttttatacggcataaaaaccgcttttggccgacagattctgatgacagtgacaattgaccgaattgcctgatcactcattattaggccgcggtctggaagcgttagctgaattcttttatctgcgcctaatatgcgggctgcttcagctgcttcttctttacgcaaactgaccgtaccgttagaagagagttccgcttctgtcaaatcgcatatcattacttttttttcctgtttgacaaacttcgctattgtgccgcccattccgatctcgacatcatcactgtgggcgccaaaagcaagaacgtcagcattatacattcggctcttctccccgaagaaggtcacggaattcgaaaacaccttcatcaagtgtgcgcacaagaatttccgcagtacccatatttgtggcgagcggaatggaatacacatcacataaacggattaatgccgagacatccggttcatgcggctgcgcggtcagcgggtcgcgcaaaaaaatgacaagatcgagtgcattggcagcgatcagtgcaccgatttgctggtctccccctaaagggccggattgaaaacgttcaatttgaagacctgtcgcctcatgaattttcaaccctgtggttccggttgcgtatagatcatgattctttaaaatatcccgataggcagtcgtaaattgaaccatatcctgttttttcttgtcatgcgcgatcaaagcaattttcattgtttatccccccgtctaatcaatgatattttctaaaccatacacaagctgatcaatcttcatgacttgttcgactgacagtttaacgcctgacatgaaagaagcacggttataagaatcatggcgtatctgaagcgtttggccatccatgccgaacatgacctcctgatgcgcgatcagtcccggaagacggacgctgtgcaagcgaataccgttttgctccgctcctcttgctcctgggagaatttctttttcatccggatgtccttgctgcttttctttacggacttctgaaatcatttccgctgttttaagcgcagttccgcttggtgcgtcaagcttctggtcatgatgaagctcaataatctcaacatcctcaaaatagttggcagccatttttgaaaatttcatcatcagtatcgcaccgagcgcaaaatttggcgcgatgatggctccgatccctttttcttctgttaaagatgtgagctcttttaaatcagcttctgagaaaccggttgttccgacaactggacggactccgtgctctaatgcaatttttgtatgtacttttccgatttcgggcgttgttaaatcaatcaagacatccggttgtgtttctgtaaaacaggcatggatatctgtataaatgaaagcatctgactcaacaggcatcacatcagataatttttgctgatcgtatgtatggtctatggccccgacaaggtcaaaatgaggtgttcgttctgccaatttaacagcttcctgccccattcttccacgcggtcccgcaatgactactttaattgtttcgtttgacatctcgatctcctctactttccttcttcttttctggtccagcgatctttatctcttgtattaaatttatgcatgactcggtcgtgggcttcctctaaagagatatcaagggagttggctaaacaaaccaatacaaatagcacatcgcccatttcctcttccatgcttttatcatcttcagtcgctttttttggtttttctccataacggtgattcacttctctggcaagctcgcccagttcttcagtcagcctcgccatcatggccagcgggctgaaatatccttctttaaattggccgatgtaacagtctacttcagcctgtatgtctttcattgttttatcactcactgaacgaaacctcctatcatcctcttacatgttagctaattcagatacgtttgacaaatgtttaagcacgtttgctgttttctttttcatccactataatataaacgctatctaatggaaggaaaaggggttttatgtgatgcttggagaaattagattaaaaaacatattttttattttaatcggagcggcaattttttcatttggcttggttcatttcaatatgcagaacaatctggctgagggcggttttacaggtattacacttttgctttatgcccttttccacatcagcccctctatatcgaacctggtgttgaacattccgattttttttattggctggcgtttgctcggcaggacaatgtttgtttatacccttgtcggcactgtagccttgtctttgttcctcagcatctttcagcgatatgaaatccatatgccccttcagcacgacttagcgctcgccgctttatttgccggcgtattcatcggagccggcctgggaattatttttaagttcggcggtacgacaggcggtgttgatatcatcgcacgtttagtgaataagtattttgggatcccgatgggcagaacgatgtttgctttcgatgcctgcgtcatcattttgtctttgcttacttatctctcctataaagaagcgatgtatacgctggtagctgtatttgtagcggcaagattaatcgattttattcaggaaggcggatacgctgctaaaggcgctacgatcatctcttcgaaaaacgacctgattcagaaaaagattcttgaagaaatggaacggggcgtcaccattttgaaaggacaaggctcctacacaaaagaggatatagatgtactttattgtgtggtgccgaaaaacgaattggtgatgctgaaaagcgtgattaactccattgatccccatgcctttgtagcggtaagcgatgttcacgatgtgctcggagaaggatttacgcttgatgaaaataaaaatccgcttccgcgctgacatgtaatagaaaaaaggcggctgaccgccgcccctcacccttatttagggtagtccctttttttcagcttgtttttttccgccttgtactttctgtaaccgacataggtaagagcagtaatgatgatactgccggttgtaatcatcacccagagtaaagacggatcggcatcatcctcctccaccctgtcaaacacatttttcaggtcatgctgaagaagggaaagccgttcaagcttcgtgctctctgtcatttgctgaaattcctcttgctcaataacatctatatgttttccgactgtttcaagctgatcctctgatacatcgattgtaagactggggtaaatcaagtcatataaactgataaattcattccatttttcatgaaagcttatgcttccattcttctggacatctcgcttcagctcagtaaaagcttccataatcggtttttccagtgagccccaaagcgggtcagaccgattgtcaaccgcatccatcagcattctgaactgcgcggctgctctgagtttttgtgtgtctgatgtatcagcttgctttaaactccgaaccatatcattatagcccaatgtgatttgacgaatttgggctcccgttagcatggggtcttgctgttttttctcagcggattttaatgttttttcaaaatactccaagacttgaagcgcctcttcatatttcgcctgtcgggtcatttgaaagactgtatcggataaatcattcaattcctcgaggcttccccgctctgcagccttggcatttccattataaaaaataagtgcaatcaacaaacagatcgtcagctttcgtttcatgcaggtccctcccactctctctccttacagaatatgaagaaagggacaaggatagaccaacattgtctttacatcagctcaagcttcgtttgtttttttgagaccacaagaaagtaagcaagcgcgattgaaaagatgcttagccaaaatgttccgtatcctatttcagtcatataatcagaaagcatagagtattgcggcatcatatcaaacaagtagtcaatgacatcgttatgcagtgtccagactgcagcaattgcaagatgccaaaatgaaaaacgaaaatacggactgtataatacgccttgaactgccattgcaaaatgcgaagcaattagcatgtagccctcccacggcaagtcaccagttactgcaagcacaagaaaattcatagccaccgcccataggccatactttacgagggtaactagcgcaagcgcctcaaagaacggagcattccgtttcatgagaaaggcaagcagcacaaacagaaagaaaaacgttgctgtcggactgtccggaacaaaaatcaggaaacgtgccggtgtctccaaaagctgcggcaagtaccaatagtagccgtaaaccgttcccagaaaattaatggctaagacaagaataagcatcggccgctgccctaatacatattgaaaccatttcacatcgaatcaactctcagtctgtaaaaataatatgtccaaataaaaaagctgacgccgggtcagcttttgataataaaagtatatccttccatttgacaattcacaatacgttattttgcggttgtttcagaaataaattttgcaagttcttcgagctgcttatcatttcctttgaacacacccgccggcattttgcctttcccttctacagcgatttttttgatttcatccggtttcagcccgctgtcaaccaatgaaggcccggccgctcctccctgaaggttatccccatggcaagaaatacagccctgttccttaaaaaccttatatccttctgcattggtgtcaatgtcggcttcttttgtaattttcccctgttcttctgccttggcccagtcatgagtagcaactgactgccacgtcaaaaatacagcagcggaaatggccagaagcatcataccgacagcgaccggacgcttccacggccttctttctgtccctctgtctaggaatggagccaaaagcagggccccaaaagcgagacctggcataatcatggcgccgaccactgtaaagcttccggcggcgtattcatacttcaacagctggtataagaaaagaaaataccaatccggcagcggaatatacccagtatcagtcgggtccgccatccgctccaaaggcggctgatgcacaatcgtcaaaacgagaaaaccgatgagaaagacagctccaaccatccattcctttaacaagaaatttggccagaaagcctctgttttacccggatactccgaataatccttcggtatattcggctttttttcagccggtatccttgagtcgcctacaaatttcatccctttgccccggtgcatgtcatcccctcccttttattcgcagatcaagagtttaaagcggtcctgaaatcccctgcttccggatcataataaaatgtgcagccatcagcccgaacaatgcggcaggaagaaaaaatacatggatcgcaaaaaacctagtcagcgtttgggcgcctacaatatccggatgccctgcaaggagcgttttaacttgcgttccgatcaaaggcgtagcttcggcgatctgcagcccgacttttgttgcaaacagagccttcatatcccaaggaagcaagtagcctgtaaagccaagaccgagcataacaaaaaagatcagcacaccgacaatccagttcagctcgcgcggttttttatacgcgccttggaaaaagaccctcagcgtatgtaaaaacatcatcacaatgaccaggctcgcaccccagtggtgcatccccctgacaatctggccgaatgccacttcattttgcaaataatataccgattcccaggcatttttgatatcaggcacataatacatcgttaaaaacattccagataatacttggataacggttacaaaaaacgtcagtcccccaaagcaatacacaaacgcagagaaatgatgggcgggattcacatgttccggtacttcgtgatcggcaatatccctccacatcggtgtaatatcaagccgctcgtctacccagtcataaattttgttcagcatgtcacccttcccccttaggctttgcttttccaagatacaggaagccgtcttttacttcttgctcataatgatcaagaggcgcaagcggcggcgtgccagggacattggtgccgtccttttcatagagtccgtaatggcatggacaaaagaatttattcgggtttttaggatcactattccagttcaccgtacaccctaaatgtttacaaattggcgaaagtgctacaatttcatccccgtttttgaagacccaggctgatcttgactcttctgactcataccaggcatcgacttgattaattttaaaatcaaagcgctgcggctcttttgtcaactcatcaacgctgacaacctgaaccatatcctgcttccctgtcgattttaataccgggtcgagtgcgaagcgaaccataggcatgagcatactagccgccataaaacctcctacacctgtgagcgtgtaattcaaaaattgacgtctggatatatcatgttttccgcccatctcttctcccccctctaggtcacccctgcaaactgactaaaatagaaaatattgcaataactctagacaccctcataatatatgaatctctcagcaaggtcaatatagccaaaatattgtttataaggaaatgtaagtgtttttatgaagtgctccataactgtaacaaaacgttcaaaatttcagcagtgcgttcatccaatatttttcttattaaagagtcatttaaatgctctaatggaacagacggtgtaacaatgattttgcctaacgcatcctcagctctccaactttcgtcagatgtgagcaggacaacatgcggaaattccgttatcagctcttcccgcaaatccttaagcccttgaacggttatttcatttctatcaacatatgtataaggcggaagtaaatatacccgtccctttaactgcctttcaagttcttctgagagaagctgcgtaaactcgcctttctccgccgccattttaaaatggttattaacccttatgttaattaatggtatgacagcggtatcaatgtaatccttagcttgtaaatagtccttggcatcagtgattctccacctcatcgttctccccctttacggcaacaagccttgcaattcactgcaaggctggtcatattatgtgagctgatttaattggcgcgataattgttcaaatgcctctttatcatgacgatctaacgcctcgtcaatgtcttttaataatttttctctttggaatgtggaaatagcgtgctctaaaatctgttccgccaatccctgatcttttttattctcaaaaaggtttttcggaatatgcgggttggactccagcaccgccgcatattcaggtgagctgtaagccgaacggaaattaagctggataaacaaatcctgctgtttatttaatctaatatcatgaaaagatttttccgcgtcggtagtcatgacattctctttatagaaccggaacggaacttcttcaacacaatgtgttgacattataatgcctctcgggcaaaattcagcctgctccacaaaatgaaccttctccatgagagaatcatggctcattaagtagttcaagatccaaacgcactctcggcgctttaactgataatggtttaaaaaccaacggataaaatcttttttctcattgacagaaacaggggtctgcatgtaattccctcctctatcgttcgtataatctatatacttatatgttccacatgaatggttaatattcctgcttatctagaaaattcatcctcgattcgcaaaatcgtttcttcaagctcttcattggctccgtccatttcaagaacctttttcaaaagcggcagcgcttctttttgaagaccttcttctaataggaagcttgcgtattcatataagaaatctctatcctcccggtaatgaagataggcagcctcaaaggattgttttgcttcctcgtattgctctaattcagtatatgcgcttgcaagataccaattgtatttaggatcttcttcaccgtagcttcgaacctcttgaataagatcaatgatctgatcataatcctcttctttgtgatacacggcaagaagtgtatgaagcgcctcgacaaagcccggatcaagcgcaagcgcctcctgaagcagcttcttcccctcttctgacttcccgattttcaaggccattttggcggcataaaggaaaagttctttgttatattcatcatatctgatcccctcttttgccgtttttaatgcctcttcatacattccttcagcttcatagcttttcgagagcggcatataaagtgaagtataagatggatcaagctcctttaaatcagacagctgcttaatagctgttttcacaagccccgcctgtaaggctgtaaaaccatagccgaaaatcgtattaggatcaggattctcatcgacagctttctcataccatggaatggcatcctcaaattcacctgaggcacttaacgattctgccagtctttgatggacattaacgcccccgatctcactctgctcctcagccgttgttttaaaatattgaaccgcttttgcataggctccctgagcaaagtaaagttctcccagtgcaaaatcaataacaggttcattgtccagaatggactttgcctggaaaagcttttgttcactgacttcgaataacccctgcatctgataaagatccgccataagcagcaaactttccggatatgatggatctgtttccggaatagtctccagcacagcgagggctttttcttcttcgtcaatatctattaaaagttcagcgtagaaattcgtcagttctgtttcatttggatataaatcatgtagatcactaatcagtgaaatggctttttctacatcgccccactcgtaataaagctgggctgcaatggctttatcttcatcatgcagctgtttttcagccttcgagagcgtgttgaggcctttttctgtttcacctgcttcaactaattttatggcttcttgaatcaatgtattcaaatcggaccggtcctttcttttcctatacaacatcaaccatacaaaaaagctttatttgttcgggttaatcttatcataattcagacgaatgcccccggcaaataagatgcttctgtacggaagggaattattgagtcttattagtttaccaaaagatcttgagatagaaaatgaaaaaaggaagatcgccctctgtacagtaaagcagctctttgacctgccggcttgtaagtaaagcacatcccccttttcgtttttctatcccctctataagacaagctatgttttttcgcctcgaattatgatctgcataaaaaatcctgaagtaaaacttcaggattttttcgaaagcttatttaaatgctcgaagaaggttggataagaaacgtgaatggcatccgtgtgctcgatttcaatcggctcctccgttatacaggaagcaataccaagcatcattccgattcgatgatctccgtggctggacactgccgcgccgcctttcaacgtttgtttgccataaaccttcattccatctgctgtcggttcaatttcagcacccagcttgcgaagctcagaaacaacagtatcaatacggtttgtttctttcacttttagctctgccgcgtccttgataacggtagttccttcagcctgagtcgcaagaagcgcgatgatagggatctcatcaattaaacgcggaatgatatctcctccgatttcaactgcctttagagatgacgtttctataatcaaatctccataaggctctgcaccgctatcagcagatggtttgatttcaagttttgcccccatgttttgaaggacatcaataatacctgtccgagtcggatttaaacctacgtttttcaatacaattctgctgtttggaaccatcgcgccagcagcaaggaaaaacgcggctgaagaaatgtctccaggaacaaaaatatcagcagctgtcagtttctggccaccagcaatggaaacactcgtttgatcttcagaaagcttaacgccaaaagcagaaagcatccgctcagtgtggtcccgagatttatggggctctgttacagttgttgtgccctcagcctgtaatccggccagcaaaacagcagatttaatttgcgcgcttgcaacaggtgatacataatcaattccttttaatgaagcgccgctcactgacagcggtgtaaactctccgccggctctgccgtcgattttagcccccatttttttcaaaggctcagtcacacgcttcattgggcgcttcgcaatgctctcatctccggctaccgcgctgtaaaaaggacggcccgccaatattccgagcatcaggcgaatggttgtacctgaatttccgacatctaaaaggctttctggctctttcagggcatcgattccttttccgtgaatcacgacatcgctgctgctttgctcaatgtgaacacccatttttctaaagcaatcgatcgtgctcagacaatctgctcccggcagaaagtttttaactgttgttgtgcctgccgctagcgcgccaaacataacagagcggtgagaaatggatttatcaccgggaatatgtatttctccatgtaaggtctgcaccttttctcgtttcattttttccacctcaatcagcataaaaagtttcatattccgcccgggcttcaatgcattgttctgcccttttgcggtcgtcatcagactgaaaactgatccttaaaatcccgttaatatcctctcgtgtttcgataatgcggatattcgtgatactgatgcgctccgcagctaagatcgctgttatctcggatattacacccggatgatcgggtacatccacatataaatcataaaatgcaggtatcgctcccttctgccgaagcggcagcccgtcgcgataatccttggcggttttaaaataacgaaatagattttccgcatcttcttgttctacatatgtacggatcttgtcaatttcacgaatccactcatcaaaacggtctaagattttatctttattatgtaataaaatatcccgccacattgccgggctgcttgatgcaatccttgtaatatctctgaatccgccggcagcaaaacgcttaacaagcggatacaggttttccgaatgatgggtttggtgaacaagactagctgctacaatatgcggaaaatgactgattacacttgtaacgccatcatgctcctccggcgacatttccacaaaatgggcattcgtacccttcagcagattttttaactgttccacagcttgtttgtctgttttctggcctggggttaaaatataaaatgcattttcaaacaggaactccttcgcagcggccactcctgatttatgtgaacccgccatcggatgccctccgacaaattgatagcggctaggcagcacttgatcagcgtaatcaaccactttttgctttgtgcttcctacatccgtaatcaaaagctcatgttcaattcctgaatgagccagcgcttcaagcataaccagtgtttgttcaacaggtgtcgcaatgattactgtagctgcctctttcgcaccgctaataaacgaatcagcacgatcgtctatcacgcctaattttaatgccgctaccgcctgttcatcagagatatcgattccgataatccgtttgccgggatgattttttttgatggctagggctatcgaaccgcctatcaatccgagaccggcgagcaatattgtatctttcatttgattcatacgtcatcacctggtttatagactaaagaggtgatattcgatcacctcttataaaatttcagctaaaatggcaagtatttcttcattttgctcttttgttccgatcgtaatccggagtgatgtcgggaaacctaatgcatttcctgaccggacgatatagcctttttccagcagagcctgaaacagttcatcagcaggacgtttaaagtcaattaacacaaaatttgtctgtgaagggtagcactttaaaccatgagttttcgcaaaatcataatactgctgaaggcctgcattattttgctcgacacaggaagcaataaacacttgatcatcaagtgcggcaatcgccgcagcctggcccagacggctcgtattaaacggctctctcgccggctcaatctggcgaatcaggttctcgtcagcaattccgtatccgactctgagcgctgccagaccgtatgcctttgaaaatgtgcgcaaaatcatcaaattggaatacttgcttaagagcggcacggtttccgggtaatcctctgctgttacatattcataatatgcttcgtcaagaacaacaaggacacgtgaaggaacgcgctccagaaatgcgagtaattctccttcagatgtataagtgccagtcggattattcgggctgcatatccaaacgacttgtgtctgttcgtcgatggcttctaacatggcgtctaaatcatgtgagccgtcgggacgaagtgcaatttcacgcacttcagcaccttcaataaccgcattatgtttatattgcggaaaagtcggggcagcagtgatcgtattggttttattgtttagaaatgcccggcagatgatctgaatgatttcatcagaaccgttgccgaaaataagtgatgtttcgctgacattgaggtgcttactgagccttgtccgcaaagcggcgctatacccgtccgggtaaagggctagctgttgaatctcatgatgaagcgcctcttttgcagcctctgaacagccgtaaggattctcgtttgaagcaagcttcacaactttatccaagccatattctgatttcactgcttcaatcggctttccaggctgataaggcttcagctgttttaaatgttctttgatacgcaaatcagtcacctcattttaaactgtacaagccgctaaacgccattgcataatcctcaaactcctgcagcgcctgatttctcgtttcagcgctgatgagccggtcctttaattcttctatttttctgacgagcgcacttcccactacgacaccgtcactaatttcattcatctttatgacctgttcacggtttgatataccgaaccctacagcgaccggaacagtgctgagattcttcactgtccgaatgaacgggtacacggatgaattgaactcattgcggacaccggtcacacccagagaagacacacagtagacgaagccctcggcttgttcaataatggttttcaaacggctttcgcttgtcggcgcaaccaaagaaatatacgtcacctcatggcttttacattcctcttgaaggctgttgctttcttctagtggcagatccggaacaagcagaccgtcaatatgattttcccgcagtaaagcgaaaaagtattctttgttcaattgtaacacaggattataatacgtaaagaggataatcggaatattcactccgttttttttcatttctccgcctaattcgattgcctttacgatattcattccttgatcaagtgcccgctttgaagcccgctggatcaccggaccgtctgcaagcgggtcagagtatgcaacaccaagctccaatgctgtggcgcctgctttttggagtgacttcgccagttcaatcgaaacctcaggaactggatcgcccaccgtaataaacgggataaacaatttttctgatggttgaagatcaaatttaaacatgggctttcacctcttcttccaatacattcattaatgtgttgacatccttgtctccccggcctgataaacagacgagaatgagttgaccgcgatccattcctttggcgagtttgaatgctttcgctaacgcatgggcagattcgattgccggcaaaatcccctctttttctgacaaaagctttaatgcatccaccgcttcttcatcagtgatactgtcataagtgacacggccgcttttatgcaagtatgcatgctccggaccgattccaggatagtcgagaccggctgaaatagagtagggctcaataatttgcccgaactcatcctgaatgagataagtcaatgaaccatgaataacccctacggttcctttcgaaatagtggcggcatgaagaggcgtatcaattccttttcctgctgcttcagcgccgatcagttcaacatcttcatttaaaaatgcctgaaacatacccatcgcattgcttcctccgcctacacatgccactactttatcaggcagagtgccttcaatacgtttcaactgatccttcgcttcctctccgatcattttttgaaattcacggaccacttgcggataaggatgcgggccgacaactgatccaatcatataaaagtgatcctcacaatgctgaacccagtaccggatcgcctcatttgtggcatccttcaatgttccgtttccgcttgttacaggcactacctccgctccaagaagcttcatgcggaaaacgttcagagactggcgggcaacatcctcttcacccataaacacagtacaggaaaagccgaatttggctgcaactgttgcagcggcaacaccatgctggccggcaccggtttcagcaatgattttcgttttgcccatttttttagcaagcagcgcttgacctagcgcattattgattttatgagaacctgtatggtttaaatcttctcgtttcaaatagattttcgcgccgcctaagtattcagtgactcgatcagcgtatgttaatgcagtcggccgtccggaatagtcctttaacagcttataatactcttcacgaaaagcggggtcatccttgatttgtttaaatgctgtttctatttcatctaacggctgcatgagtgtttccggaacaaactttcctccaaaatcaccgtatctgcctatttcattcggatatggatacatatcggttcatcctttcttctaaaagcctcatcagattctgatctttttgtccgtttttttcaattccgctggcaaggtcaattccttctggctgccatttcaataggctggtgatgctatccggattcacgccgccagcgataaagcagcgtttaccaatagccgcctgctgatattccggcacacattcccaagaaaatgcaacaccagttccgcctctagacccttttacagatgaatcaatcacaaagccgtcaacattatctttaaagcgggctatttcttgagttgtgttaccttgatggtgaagcgccttccatatttcacagcctgtcagcttgcgaagagcagcagcatccgccggtttttcatcaccgtgaagctgaatgacgtcgagcttcaagctcttggcaatacgtgacatcgtctctattgattcattaacaaaaacacctgcaacctgtttttcgacacgagcttggttcagccattttttcacatcttgcggagatacttttcgtttgctttcagcaaaaataaatcctaggtaatcagcctgtgattccgccgcaagctgcaaatcctttagtgaccgaataccgcaatattttaatgccggtttcttcacaacctcactccccaaacaaagcatggattgctttacgctgagaagtttgtctcatcaatgattcaccaataagtacagctcgcgccccatgttcattgacaaatgttaaatgttctaaagaaccgattccgctttcgctgacaagcaaggattctttcggaacgagagatgcgatttgttctgtctgctttacagatgtttcaaacgtttttaggtttcgattatttacgccgagaatgtcgggtgtgaacactttcaatatttgttctagcgttgatgcatcatgaacctccactaacacgtccatccccttttcacctgcttcaagatataattcatgaaggtgtaagggatcaagcacctcgccgattaacaatatggcatccgctccgattcttcttgattcctctacttgaagagaatcaataataaaatcttttctaagtacaggaatcgaaacagcacgctttacgtctgataaatagctgttttccccttgaaaaaacggggtgtctgttaaaacggaaatcgcatctgccttcgcagcctcatagtcttttgcaatctgcacaggcacaaaattctctttaataagcccttttgacggcgatgctttcttcacttcggcaatcaacccgataaaccgattcgggcttgccagcgcctccttaaatgaacgtttctcgaaaggctgctctaccggcaaaaccagtgttttcacttcttctttcttttgtttgatgattttttcaagcatagatctcttcctctttctgctttagtcgttcaagctgcgcggcagcgcctccgcttgtaatcgtctctaacgccagctccgttccttccttcagtgaggcggtaatccccgccgtgtaaatcgcagctcccgcattaaaagccgtaatagataaagcggaactgctgcttttattttcaaaaatattctgaatgagataggcgctctctttcggtgactgcacctgtaaatcttcaagtctgccatttgtgaaaccgaaatcttcgggtgaaacggtatattcccggcgctctccgtcctttaattcaatcacgtcggtcggtgctgtaattgaaagctcatctaaaccgtcacggcttgatacaaacatgacgtgcttcggctgaaacgtctccagtgcgcttgccatcagtccagctttttcaacagaatagaccccaatcacctgacgcttcgcctgtaaaggattgctgagcggcccaagcagattaaataccgttctgaaacctagctcttttctagtacctgctacatgtttcatagacgaatggtaaagcggcgcaaaaagaaatcccatgttgtttgtttcaatgctgcttttgaccttctcgggagtggtttgaatagaaacctctagctcctctaaaacatcagcgcttccgcttttagaagagacagagcgattgccatgcttagcgattttcgcgccagctgccgaggcaacaattgccgaggcagttgagatattaaaagtggaaataccgtctccccctgttccgcatgtatcaacaatatcaggaagtccatcgactgtaagagcgtgtgcccgcattgccttcacaaaacccgcaagctcttctggcgtctccccccgatgagcaagaatagacaatataccacccatttccgaaggagtcatttccgctgccatcatcatattcatcaacgtttcagcctcaccggcagtaaggttttttccgtcaacgcacaattgaagaaatttgttcatcagctttatcctccttgctatgaaacatgtcttctgcaatatgaatcgttttcagcagcgcaccggctttattacagctttcttcgtattcggcttctggaacagaatcagcaacaatgccagcacctgcctgtatcgatgcaacgccgttctttacactcatcgtgcgaatcgtaatacaagagtcgatattcccgtcaaacccaatgtaggcaatacaccctccgtatgtctctctcggtgttggctcgagctcttgcaaaagctgcatggcacggattttgggtgcgcctgttaaagtccccgccgggaaagcagacatcagtgcatcgacaggatgaaccccttttttcaatcggcctgtaaccaccgagataatgtgcatgacatgtgaaaaggagacaatttttgtgaactccggcacagaaacagaaccatactctgctactctgccgatatcgtttcgggcaagatcaacgagcatgtaatgctccgccttttctttttcatccttcatcagctcaaccttcagtctctcatcttcagctttgtctgcgccgcgttttctcgtaccggcaatcggatggatttctaagtgcccgtcttgaacgtgtattaaccgttccggagagctgccgactatttctctgtctagcagtttcatataatacatatacggcgaaggattgacgatcctaagcactcggtataactcaaaagcatctgcttttatcggcacctcaaatttttgtgataaaacaccctggaagatatctcctgcttttatatagcttttgattttttctacatcagccataaaagccgatttttcataattagaagataccgtctcaaagctgggtgtcttgtatgaatcagcagagagaaacagctcttttatttttttttggtccatcattttttcgatgagattttggagctccaaatgattttgatggaatacatccattttttcgttttctgtttcctctccagtgagccttgcatattggataaagtggacgtttttggtttcatgatcatacgcaattaatgtccggcaaacaaacagcatgcacttttccatgtctgtttcttttgtatgcgaaggaacagaaggctcaatcagcgggatcatatcatagcttaagtacccgacagctccgccgacaaaaggaatgccaagctgaggtgttttgattttgtatgtggtattcatccagttcagcacttcttttagttcatttcctgtgtaaagagatttgctgtcctgatcagcggccgaaaaacggccctgctcttctttaattgtgagaaatggatgcaggccgataaatgaatatctggaccaagtggatgtatcgtcctggctttcaagaagatacgtaatctccctgtcaagcttctctatcatttgaatgggtgtcagtgtatcgactgtgaaggtctccacaatcggtatcgtgtggtgggacaagctgtcctctaaaaatgcggaaatgtttgattggaaattcattactctcactccttatggcaaggagaatgagaagatggcatgagaggataaaatactatataacaaataaacccaaaagaaagacttcttttgggtagaataaacataatgtctcagctcaactaaactcattctctgctaccctattctctaactcaactcattctaattgctttatacacactcttgtgtatttctaagctgttcttatcgtattacaattcagtattttttgtcaatgataaatcgggcctcaatacgacggctttttctaaatatacatgtctgatctgatcctgagggacatctgtctggaccgtcatcatgactcttatgcactttttcagaccgcctgttacgtccatttcctgcatacatgttaccggtacatactgccatcctgaaagctcgcgaacagcttttgccgggaaaacagcgtgcaaatcaggtgtagccgacagaagcatttgaacaacatcttccggttttgtatgattttcttctatgattttctctaacagctgtttagttttttgtaaaatttcttcttcagtatcccgttcaactgtagttgctccgcgaattccgcgaatcatcatgatgtctcctccaatcgccatttgttcagccagctctcaagttcatttctggaaaatgtatgatcagcaactttccctaattcgttgagcacaataaactgaatcttcccgccacgggttttcttatcattcatcatacggtccaagagaaccgaagtttccgtctcttttctgatttgacttggataacccaggctttttagccagctgaccaaacgttttctgtccatttcacagcctacagtcttttcgcttatatataaagcaaactgcattccgagggctacggcatcaccgtgagtgatctgcccgtatccatattccgcctcaacggcatgaccgagcgtatgcccgaagtttaagtaagctcttatcccctcttctttttcatcctgctgaacgacagacgctttaattgaaatgcctttaaaaatcatgtcattcagctgatcattagtgatatcacgcagtgagtggatattcagcaactcctccagaaacgctctgtcatagataaaagcgtgtttaatcacttctgccattccggacctaagctctttttcaggcagagaacgcaggaaatctgtatcatagagcacggctttcggctgataaaacgcaccgattagattttttccaagcggatggttcacggctacttttcctccgactgcgctgtcatgcgccaagagcgtcgtaggcatttggatgaaatcaatgccgcgcataaaagtggcagccacaaaaccggcaagatcccctacaacaccgccaccgaatgcgatgatgcatgaggagcgatccaaatgaaaacgaatcgcttcactctgcaattttgtgtacatgtccatggattttgcctgctctccactcggtaccgtcacttttttcacaggccatttatcttgcagcaaatggagcatttcatcaccatacaggcggtccacttcttcatccgtgacaagcataatccttgttaaaggcctgtttaaagaggttaatagttcgcaagccttttttctgataccttgtccgataaaaacaggatatgacgaggaagcagtttgaacatgcagtgtcttcattaaaattccctcgacagttttctcatattctccacattttctctaatgcggtcaatttgatctaatccgaattgttcaacgactgcgttcgcaatttcccaagcgacagccgcttcagcgactacacttgccgcaggaacagcacagctgtctgaacgttcaatgctggcagaaaacggttctttcgtttcaatatcgacacttttcagcggtttatacaaagtcggaatcggcttcatgactccgcggacaacgattggcatccctgtcgtcatgccgccttccagtccgccaagtctgttagtagcacgggtgtatcctttttcctcgtcccaaatgatctcgtcatggacttcgcttccatttcggcctgccgcctcaaatccgatcccgaattccacacctttaaatgcattaattgacagtacagcggcagcaagcttgctatccagtttgcggtcataatggacatagctgcccacgcctaccggcattccctcgacaatgacttctactattccgccgatggaatctccgtttgcctttgcttcatcaatggcagccatcatttttttgcctgcctcttcatcgtagcatctgacaggagactcttccgttacgcgctgcaggtcttcaattgacgtatattctgttttttcagctttaacagcgccaatttgcaacacgtggcccgccaccttaatgccaagctcagaaagaatctttttagctacagcccctgccgccactctgacagttgtttcccttgctgaagaccgctcaagcacatttctcatatcacgatgattatatttaattgcaccgtttaagtcagcgtgcccaggtctaggtctggaaatctggcgcttcatttccttttcttcatcttctgtaattggagcggcgcccatgatttttgtccaatgcttccaatcgttattttcaactacgagagcaattggtgaaccgagtgtacgtgcatggcgcaccccgctcataattttggcctggtctttttcgatctgcatgcggcgaccgcggccgtgtcctttttggcgtctggcaagctcaaaattgatatcttcctccgttatgtaaagcccggcaggtacaccctcaataatggttgtcagttgggggccgtgtgattctccggctgttaaatatctcatgacttcttctcccttcatcacattaacgcttttaagtaagactactataacatatttttcagcaaaaagtcagtctatcttttttgataaaagaatgtatcggctgggactaggccaaatttctcgggattgaagatttgctcggtgctgccgacaaaaagaactccattcttcttcaagctatgtgccatttttaaatacagctcttccttcgcgctttctgtaaaataaataaatacattgcggcacacgattaagtcaaagtcttgttcataacgatccgccagcaaattgtgctttttgaatgtaatattctttttgatttccgttttcacttcataacttctatttgcgttttgcgtaaaataacgatctttcacagatagcggcacttcctgtaaagaccgctcctgataaacgccttttttggctttttccaaagctttttcatcaatatccgtcgccaaaatctgatagcccggaagacctttttgctggtccaaaagcatggcaagcgtgtatggctcctcacccgttgagcaggcggcactccaaatctttaaaggcctagaggtcttgattaacggcagaattgcagtctcaagaacttcccatcttttataattacgataaaattctgaaacattgatcgtcattctgtccaatgtttcatttaagagagcttgatccttttccaatgccgccgcaaagtccttaaagctttggaacccctttttctcataaagtgacgttagccttctcttcatttgtgcttctttatatagtgtcaaatcgactccggttaattgtttccattttgttgtaaatacgctgtatgtatccatctctactctcccagtctcgctgtctttttgtcctagtatagcttgttttatcaggaaattgtattgtttcaataaaaaaatcagcttttcagctgattttagatcgttgggaaaggcagaggtctgatgcacactgccaatcaaccctttattcactttaatgtaaacctttacaaaacagatcaaaaaccggcggcgttatatgttgccggctctgttgcttattttcacaatgattaatagatccagcctgccataagctgctgatatgatactaattcttcattcttaaagaaaatgttaatctcgcgttctgcactttcgagagaatcagagccgtggatgatgttttttccgacaaacatgccataatccccacgaatcgtaccaggtaaagcttctttagggtttgttttcccgatcagctgtctcgtcacttcaatgacattttcgccttcccacaccattgcgaatacaggtcctgaagtaataaactcaacgagctctccgaagaaaggcttaccttgatgttcggcgtagtgtttctcagccatttgttcagtcactctcattaacttggcgccagctaattgtaagcccttacgttcgaatctagataaaatgtccccaatgagctgacgttggacaccgtctggtttcaccatgataaaagtcttttccatcatattctccaccccatcattatgtatgtataggctttcacactgcacaccgaaatcgtaacatctttctgataattaatcaatccggggcggagaaatttcttaatatctacaaaaattaaaattttcttttaccgatatattttgcgatggctgcaagagacgagcgtgcgcgccctcgaggaagcgtgtttaatttctgaaaagctttctgcagatacatttcgcttactgccatagatgcttcaattgcatctgtttttttgatttcttcaatgattggttcaagctgttcctgcgttgtctcactgttaatcaatttaagctggttttttaatgcaggatttttcagggcatacagcactggcaatgtgacgtttccttgaagcaaatctcctcctacgggtttacccagctcttcctcagttgaagtaaaatcaagaatatcatcaataatctgataagacatgccgacgtaatacccaaaccagtacaatgccttatgaatcttctcatcagctccagacgcaatggcaccaagctggcagctgaccgcgatcaagagagctgtttttcttttgatacggcggagatacgttctgagattttgttccatgttgtatttgtctttgatctgctcaatttcccctagacaaacttcaacgatcgtctgtgacaaaatcctatgggctttcggttcgttaattctcgtcatcatttcaagagatcccgcaagcatataatcgcctgtgtacatcgcaatacgattgtcccactttgctttgattgtcggttttcctcggcgaagctctgcatcatcaatgacatcatcatgaaccaaagatgccatgtgaatcatttccagagtgacggcgacatatttaatcttattaatatcgtaatcgccaaacatgccagaaagcagcacgaaaacaggccgaatacgtttccctccggcctgcagcaggtgaagacctgcctcgcttaaaagcgggtaatcggaacgtacggtttgttcaagttctctttcgattacatcaatatcgtcatttaaaaaagagtaggccattttaaatttcatatcattcacccaaacatctgtgttttcatttccatccgatatgcgtggcagcgactccgccagtaaacgaatgatatttaacatttttcaggcccgcctcttcaaacaggcctgccagttccttcattccagggaaatctctggctgattcttgaagccaagaatattctttatagctcttcgcaaacagtttcccgaaaaacggcataatatacttaaagtacataaagtaagcctgtctgaatccgaacatttccggctgggacgtttccagacataccacctgcccacccggcttcactacacgtctcatctctttcagtacagtcaagtaatcagggacattgcggagtccgaagccaatggtgacataatcaaatgtatcatcatcaaaaggaagctccatcgcatttccgtgcagcagttcaatttggctgaatccgccgtcttttactttctgctcgccgacactcagcatattttcactgaaatccaagcccttgatctcgccgcttttgccggccgcttttgcaagagcgatcgtccagtcagccgttccgcagcagacatcaagtgctgttgcgccttcttttacattcatgatgcgcatcgttttgtcgcgccattttttatgctgctgaaaactgatgacagagttcatttggtcatagtttttatatattttttcaaatactccgtgtacgcgctgttcttttgagtcctgcataatggtttacccttcttccactttctgatgataggtttgatcttggctgattgtcttcagacggtttattaaaatgttctgaataggtgaatttagaggcagaagtgactcaatgctgtttttcgcttttttaaaacaatcttctaatatctcttcttttgtttttcccagctgtataaaactcccgatcacatccagaaatgcatcatttccgttcataagccgcttaaatacaaaaaaatcactcgacagctttttccagcgcggaaggttgaagtgttccgccacacgatggaataaagctgattcaacgatgccgacactttcgaaaaaatcgttttcgtccttgaaagaacggtcatacagacgaattttatgttcgttgatttctttaatggctgtagcaagcgtccgaatcatgtagatatccttcatttcagatagtaaagagtagtacagcccgctgaaataatcgcccgcgagaacagtcaattggcggtttttgttttcgtctcgttttatgactctagctgtcgtcacttcatcatgggtatcaagggcgctttgtacaagcatcgctgttacaatataattttctctgtcgttgttttttatgtcagcttcttcaaataaagcatgaaaaagaagaagcttatcctcatcaattttcggcgcggaaatatgcttcgctaaataaggatgagacagcttttgttttaatttcttgttcagattggctaaagttccgtagatgtcttgcaaaaatatcacccttgtccccaaattcacatttatttcttaatctatgtatgagttttatcttttcattcgcttacgcaggtatcattatagcataaaaaaaagaaattggctgtatcctcccgctgtttgcgagcatttgcttttaacagcggggacagccagcttattttttttcgcttttcatttctccgtacgcggtttgaatcagtgcctctcctctgactttaatggcagaagtatgctctgtaaactgagcgatgatcacttctcccttgtcgagtttttcggaatggtgaaactttgtgtctgttcctcttgtcaggccgatcacattcactccgtcctcaacggctttaatgacgacaaaatcacttgaatgcttttggttcatttatagcaccctctatctttattagtcctggcgtttaatatgttccaatacttctgcacgggcagcggcatcatctttaaaaacgcctctgactgctgaagtcacagttttcgcacccggttttcttacaccgcgcatcgtcatgcacatgtgttccgcttcaaccactaccattacgccatgcggatcaagcgtttctacgatgctttctgcaattgtagaagtgatgcgttcctgaagctgcgggcgctttgcaacggcttcaacggcacgtgccagtttgctgagtcctgtgacctttccgcctcgcgggatatatgcaacatgtgcttttccataaaagggaacaaggtgatgctcacacatagaatgaaacgcgatatcttttacaagaacaagctcctcatggttttcaccgaagatagtctggaaatgttcttttggatcttcattcaagccggagaatacttcggcatacatctttgcgactcttttcggagtatcaagaagcccttctctattcgggtcttctccgatcgcttctaaaatttgacgaacagcttgttcgatttgctctttattaacttctttcatgttctatgtcctccaccaatgaatacatttaatttcgattctagcacatatgccccgctaaaagcaaagtgaatgccctgtcaggaagcccatgctcttgaaatatgaaaagccccttagaaaggggcttttctgtgaagaaataaagtgtatgtaagctagatgcatacacgatctatattcacaattattttccggcaactgcgtctttaagcgctttacctggtttgaaagcaggtactttgcttgctggaatttcgatttcttcacctgtttgaggattgcgtcctttacgtgcagaacgttcacgcacctcgaagttaccaaaaccgatcagttggattttatcaccgtttttaagtgcatctaagatcgtatcaaaaacagagtcaactgcttttgtagcgtcttttttagacaattcgcttgcttctgcaaccgcattgataagttctgttttgttcatgcctttcacctcctcccaaaaggatacattcagttcgtttattatcatttcttcacagttcagtctgattctaaacctgtctcagaaaaaaatgagagcaagtaagagaaagacaattaaacggctttttaagaaaaactgcactctgaggaatgtttgtccaacaaagtgaagaatttctgtatgtagagtaacacatataaaaagccatatcaagcattttaaagcgtcaatcccttgctcgtcaaggatttaaggtgatttaccgaacaaatattcctttttttccttttttcatcctattccttgatccttttccattattaagaacaaagaaaaaagacctcccattctataaagaggtctaccggtattacaggatgatggcgattaagccgccagagccttcgtttatgattctttctaatgtttcttttaatttataccgtgcgttttcaggcattaatgacagctttgcctgaatcccttctctcacaattgagctcagcgaccttccgaagatatcggaattccagatggagagcggatcatcctcaaagtcctgcattaaatagcgtacaagctcttcactttgtttttccgttccgataatcggggcgaattcgctttcgacatcgactttgatcatatggatcgacggagcgacagctttcagcctcacaccgaatcgtgagccctgccttataatttccggctcatcgagactcatatcagctaaagcaggcgctgcaatgccgtatcccgtctgtttgaccatttttaaggcatcagacacttgatcatattctgttttcgcatgggcgaagtcttgcatgagctcaagcagatggtctcttcctctgatttcgacgcccacaacttcttttaggatttgatcatatagatgatcaggcgcgtacaaatcaatttctgccaccccttggcccagctcaattccggctaatccggcactttcaatgaattcaaactcgctgaattggccgacaaccctgtctacgtcccggagccgtttaatatccttaaccgtttccttcacggactcctgatagctttcacgcagccaatggttttctttcagcaccattacccagcttgggagattgacattcacttctagcaccggaaactcgtagagggcctctctgagcacactcagcacatctgattcccgcatgctctctacactcattgccaataccgggatatcatatttttcgcttaaatcctggcgcatggcttccgtttccgggtgatacggcctgactgagttgatgaccataataaaaggtttgccaacctctttcagctcttcaatgactctttcttcagcctctatatagtcacttctggcgatatctccaatggtgccgtctgtcgtaatgacaactccgatggtcgagtgttcttgaatgacttttcgagtgccgatttcagcagcctcatgaaatgggatcggttcttcgtaccaaggcgtattgatcatccgcggcccgttttcatcttcgtatcctttagcgccgggcactgtgtaacctacacaatctactaatcttatattcacatcgagtccgtctgacacatgaacagacatcgcctgattcggaacaaatttaggctctgtagtcataatggttttgccggctgcgctctgcggcagttcatcctgcgctcgggcccggtctgcttcgttactgatattcgggagcaccacaagctccataaattttttaatgaacgtggattttcctgtacggacagcacctacgactcctaagtatatatcgcctcctgttcgttcagcgatatccttgaaaatatcgaccttttccaagtgatcccctcccggacttcctatccttttcaattttattaagctctttcaatcaaacacaggacactatatgtgtatgacgttgtcctatttgaatatgacatctttagaaaatttctcatcctcaatctattaaagtataaaaaaacctttctccctatttgtatgcaagggagaaaggttcattcctttttcatatcattttctaaaaaaacaggttcctgtttgtcatttaccgtatattttacagaaaacgcggggacaaagggggtatcctgccaaatcatatcctggatttcagtcccgggtttaaacgtttttttgctttttttgaggcaagaagccagctcagtccggtaatcggcatatatttctccgtctccgtcaatcataagcggcaaggaattccctgagattgggcttgtcactgtaagagagcttccatccccaagcttcttctcatcgagtgtaaataaatcacgagatagcacatccttgtaaggcggatattgatgctcctgacgatacatttggatgcgcaatttcacatcgcgaattttttctgccatctttagatcaattaatttaacagtcggatcgttctctacgtcaacaagcacgtattgatagtctcccccgctttcaaatgccgtacttggaggttcagctatgtatcttggcgctaaccggttaaagtctatcggatatttttgatatagcggtgtcgacatatctttggtttgaataggaagcagccctccatttgccttttgaaattcatcaacagcagattgaacctgctttagctggtcttgataaggaatggcatgcacactgcttttccgttcatttggatataaacatccggataaaaacacgactgccgcaaaaatgattgcgcacttcagtttacccatacagcacttccttttacagctttattcattgacagggccgctaaaaaccacgacaaacacaataattccagatatgagcatacacatgtatgcgaatgatgaaatcgcaatcttcaaaaaacggttttggcacttaaagcggcttaaatagatggaagctacagccagaaacatcagacccatggaccctagagcaaaccacattttcatcaatgccagattcaatgacgtgcgcctccccgatatgtatgatgtaagcgttatattatattttaatatacagcgccggaaaagatcaaccagattttccatccattgatagaacaaaaaaactgaagcaaagagggggaccttcgcttcagtcaacttgactatattcacctgcacgtttaagaaacactctcttggacttcgatgctatagtatgcgacttggcatacagatgcatcctctattgcctaaatcggcaaaatgtttcaggagatcccaagacttgggtgttcttctgtttttcgggctttcgttcaattaagatatgcgtttcatcataccattgacacttttacttcacttgattttcaaacgtatttaccaaatcctccatctcgtgggttttccctcttgccattaaagattcaacagcggtttccactttttgtccgttgaacaggacctgatggagagcttctgtaatcggcattttaacatcatatttcttcgaaagctgataagccgctttcgtcgtgcggacgccttcgactaccattcccatctcttcaagaacatcttcaagcttgtacccttttccgagcaaattgcccgcacgccagtttctggaatgaacacttgtgcacgtcacaatcagatcgcctactcctgtcaatccagagaacgtcaagggatttccgcccattttcgttccgagtctcgcgatttcggcaagtccgcgtgtaatcaaagcagctttggcattgtcgccgtaccctaaaccatctgtaattcctgcagcaagggcaataatattttttaaagcccctccgatttcaactccgataatgtcaggatttgtgtacacccgaaaattgtgattaataaatagatcctgcacctcttctgctgccctcatgctctttgaagatgcagtaacagttgtggggtgccgcagccctacttcttccgcatgactcgggccggaaaggacaacgatatcttttctgacatcactcgggagctcaatttccataatttcagaaatgcgcagaagtgaatctggctcaatacccttgctgacatgaacaaagactgcctttttcgttataaaagggacagcctgtctcagcacttcccgaattgcttttgtcgggaccgcaacgataatgaaatctgcgtctgaaacagcctctttcatatctgttgttcctttaatggatgtagacagcttaacattcggcaaataatctttgttttcatgcaactcattaatttgatgaattaaatctgcacggtgagcccacacacacacttcatttccattatcagttagaactaaagccagtgctgttccccaactccctgctccaagcattgtgacttttttcatgtttgattcacacctttttattttctagctcttgcaaatattttgattggtgtcccctcaaaaccgaacgcgtctctgattcggttttctaaaaaccgttcgtatgaaaaatgcatcaattccggatcgtttacaaacacaacgaagcttggcggctttaccgacacttgagtcgcatagtaaatcttcaaacgagaaccgttatgagtcggtgtcggattcattgccacagcatccatgatgacatcatttaagacgttcgtctgaactcgaagtgaatgattttcacttgctttaataatcgcaggcatcagcgtatggatccgttttttcgttaaggcagacataaataggattggcgcataatccagaaattgaaaatgatcgcgaatattttcttcaaattctttcatcgtgctctcatctttgtcaacagcatcccatttgtttacgacgatgacgacggccttgcccgcttcgtgtgcatagccggcgatgcgcttatcctgttcaataatgccttcttcgccatccagcacaaccgccacgacttctgagcggtcaatcgctttcagcgcccgcagtacactatacttctcagtcgtttcatagacttttcctttttttcgcatacctgcagtatcgacaatgacaaactcctgctggttgtaagtaaatgacgtatcaacagcatctcttgtcgttccagccacgttgctgacaataacgcgttcttcgccgagcatcgcattcacaagtgaggactttccgacatttggacgtccgatcagacagaattgaataacttcttcattgtatttcgtttcaggaatgtttttaaaatgctctgcaacggcatccagtaaatcacccagtccgagtccgtgtgttcccgaaattggatatggctcgccaaagcctagcgaataaaaatcataaatattcgctctcatttctgtgttatccagtttattaaccgctaaaacaacaggcttttttgtgcggtacaaaattttcgccacttcttcatcagcagctgtcacaccttcacggccgttcaccataaaaataatcacgtccgcttcatccatggcgatttcagcctgctggcgaatctgcgctaagaacggctcatcaccgatatcaataccgcccgtatcaatcaaattaaaatcataattcagccattcagccgagctgtatatccgatcccttgtcacgccaggggtatcttctactattgaaattctttctcccgcaatccggttaaagattgtggattttcctacatttggtctcccgacaatggctacgacaggtttacccatagtacccttcctttcaatccagccgctttcatttttacataaattttcaaccggttattaaattcatttcattcacttttatgaaaagaaacccttcagaggaagggcttaactcatttattatatcagtttttactgggatcacaactattcttaaaaatgtttcacgatcaaatacacgtcatctccgattctgtgagctattccatcaaggatcgcctcaagatttttagcgaaaagctccatctccttttggtcattgcaaaaaaagacaggtgctccccctgcaacccggtttggatttgtcgtgattacagacaaaatcactttcgtaagagattcactcatcctatcaccttatcctgattcttgataaattcagtcggcattctaatcgcattttccaaggttggaacattgctaataatttgaacagccgtttcgggatggtgaatttgcgggagaacaaatactgccactctcccatcatttaaatcccgttttgcaattggtgtcaaagatggctctcctgaatcccgataaaccccgagcacattggaaacatcaaataaaatggcctgacgctgccctaaatttgctatcgtcgctgctgaattaaagtttttcggcgttaaaataaagcccatgccatgctttaaaatcagttcctgtttctctggaagcccgatattcatcatataaatattatcaacaaacagtcccggaccgtcaaagcgcggctttatgtactcgatgtctacaatatccttcaacacactgcccgacataaatttcatggccagtaaaaaacaaacgacagccgctatgacagcagcccagatggataaaaacacatacgcagaggttgtcaaaagcgctgtaaagatcacaatataatttctgctttcaaacgcaatggcaatcccctcaatatatgtgctaccccttgagacaagttcatacgaatccatttgcgtcaatgtgttccgctccatgtttcggacatctctaaattgcgtcgctgccaatgttaaaaatgtgatggccgtaaattcctcctgcaaaagcgccggcataataattgcacctaaaccagccgctatcaaccccagtgcgatgtgaatcactttcccatgaacataggtcggatactggcggtaatccgttttcagcatataaagccttgtcgcaattccggcaatgaccccaacaataatcggatagatgtaatcactcatgacattttggtagctcctttgtttgatcttttgcttttctgaccaatctggcttgcgaggtattcgtatttagatatgccaaacagcaatatcatccccgcagaacacgcattcagccattgaaagccgccgacagccatagccccggccaacttctggatcacaaatgaatacaccagttcgccttggcacatccctaggacaaataagacaagctgcttctcaaaattcctatcaacagaagctgttaaaagcactattaatataacagcagcccactcaggttttatgatgaaccaaaccgggtcatataatgcaaaaagataaacaaacgcatacgcggaaacaagcgtcagatagaccatgatgtaacgaaaacgatacattcccaaatacccggcatagacacatccgcaaacgaaaaacatcaaatatgcagcattcagggaaaaatataaagcgatgtcatgtatgcttagaataatattagttaaaataaagacagagacggcaattcgtcttttcgtcttttcaaaaataaatgttgtcagaacccacagaaaccacattgaccaatagtaataaaattgttccattttacttcctccatattcccagtatggagttcaagcacattttttaaacaatcgatctcatattaaggagtatgatcatgggaaaagacagacaagagaaaaaactcaaagcttcaggcagagtcgaatcagaccgcgaccagtccattcactatgacggagcgacaagccttgaacaaaacggaagattcaaaaagcgaaaatcataatacaaaaagcccaaaccacatatggttttgggcttttatcatttatcgcacactatagcttgatgtattgatccctctctctgtgagccaatgatgggtttcacctttgatcacaaggggcgccttttgtaaatcggcaatcgttctggtgcccagcacggtcataatcatctttaattcctcaaggatcagctgaatctcctcaagcagtccttcctcaccgctgtcagtcagggcttttaaaaaatgccctgccattccggtgcaagaggccccaagcgcaatggcctttgccacatcaagtgcatcttgcagaccaccagaagcgatcatggtgcttgcaggaaactcggagcggatttccgccaaacttgcagcggtcgaaatgccccacgagttaaaaaaggagatttgccgctgtcttcggagattttcgattttcgagaaatttgttcccccgtaaccgccaatgtcaacagctgcagcaccagcttcatacagctttcctgctgattctttgctcataccgaatccgacttctttcacaatgactggtacgctgacatgactgcaaatttgttcaatgcgttccagtgcgccgctaaagcttctgtctccttcaggcatcacaatttcctgaatcacattgaggtggatctgcagtgcgtttgccccaatcatctcaacggcttcctttgcctgggcagccgttgcctcgcttcccaggttggcaaaaatcagcccgtttgggttttcctttcgaacaatttcataggaaagacgctctgatggatcttttaatgctgacatttgcgatcccacagcaaggggaattccagcctgagaagccgctcgcgcaagcgatttattaatctcatatgtaagttttccaccgccgccagtcattgcattgataaaaatcggcgaactgcttgaaagttcgccgatttttgtggaaatatctacttgttctaatgcaagatcgggcagactgacgtgaacaaacgtaatatcatcaagacctgtttcccgcttctggccggtggacaaggcatgattgatgtgttgtctttttcgttctgctcgagtcacgtttatcaccaattattttagtttattcagcttatctccgatcagatctccaagctggaagccagtgcttgtttcttccttcgcttgatattgacggtaatcttcctgatcagctttaggcgtttcttcaagttcacgcatgcttaatgaaatgcgctcctcattttcattcacatcaagaaccttcacttttacagtctgtccttcttcaaggacttcatgcggcgtgccgatgtgtttattggaaatttgagaaatatgaacgagaccttcaacacctggaaggatttcaacaaaggcaccgaagcttacaagacgctgtacagttccttcaagcacatcgccaggcttcactttttcgccgatttggctccaaggtccaggcagtgtatctttgattgataaagaaatacgttcgttgtcacggtcaaccgataacactttcacttttacttcttgtccctcttcaacaacgtcagacggtttctctacatgagagtgggaaagctgtgaaatgtgtacaagtccgtcgatgccgccgatatcaacaaatgcgccaaagtcagtcaggcgctgtactttgccatcaagtacacttccaacttcaagagactgaagaagttcttgttttttattcgcttgctcactttcaacaacagcacggtgtgaaaggatcacgcggtttttatcacggtcaagctctacaacgagcagtgacagtgtttttcctttatagtcagtgaagtcttcaacgaaatgtgcttcaacaagtgatgccggaataaaaccgcgaacgccgatatcaacgacaaggccgcctttcacgacatctttcacttcagcttcaaacacttcttttgtttcaaattttttctcaaggtcttcccaagcgcggtctgcatcaacagcacgtttagataaaatcaaagcatcgtcttccacttttgttactttcaggtcaagctcgtcgtctactttaacaacatccgatgctttctctacatgaagacttgataattcactgattggaataataccggattgtttgacattgatgatttctacatctacatgtttgtcttctacctttgtcacaatccctttaactacatctccaacctctggcacttgaacatcaatttgattcatttcctctgtcatttgaataacctccttggtccaaacctacacagcttaattaaaacggtttgaaagctgaacatataacatgcccgcttttagccgaatatgtattaaagaatcatccaaaaaagttttttgaatgatcaataaaaagttttattagtattaacttctaataaaaggacaggtttgtcaagcaataacattctatcttcgttgaaaaattcaaaaaaagtggcatttgccatcctcagcgggacttttgctccacagcctcgaggattttatcagctacctcttgaatggaaagcgatgtcgtgtcgatttcaagagcgtcttctgctttacgcaacggagatacttcgcgctctgaatcaagcttgtctcttcttgcaatttcctcaattaatgtttcgaagttgacatcaaagccttttttcacattttcttcataacgacgtttcgctctctcttcaacagatgccaaaagaaagatttttacttctgcatttggcagcacatgcgtcccgatgtcacgaccatccatgacgacgccgcctttttccccaagctgctgctggcgtttcaccatctcttctctgacacttctgtgcttggccgcaattgaaacttggttgctgacttcatctgttctgatcgcctcagttacatcggtgccgtttacaagcactttttgtccatcttttgttgtaatcagctcaatgtctgtccgctttagcagctcagccagtttttcttcatctgtcagatcaacgttttcctgtaaagccgcgtacgtaatcgcccgatacatcgctcctgtatcaatatatatgtacgattttttctcagccacaattttggcaacggtgcttttccccgcagctgccgggccgtcgattgcaatcgataatttcttttccataattcctctccttgctcttttctcctctatggattgtatcacgaactttatgaaaaagggtgaaaaattgatgaataattaatgtttgaaggtttcaatcctattgttttcctccattttatccaccccttcatattgaatcacttttgatacgtatggttcaatatgctgatagtgaaaaagaaattggacaccaagtaaaatgatggcctgaatgaacaataatttgatcagcagccgttcaaatgttttcattggagcacctccattacaaatagtatggaagtgtttgccgatgtttattccattcgggcctttcttctcttatttaactggcgcctgatgcagtattgaagcaaagcctgctggtcacctgctgcaatttctgaatactctaaagtcatttttcgtttttctgacttggggtcattaaagattcgtctgacaactgcttctgtttctatttgacgtgtgtgctcctcttcaggaagacggatgatcaggcgcaatgattcccccgattgaaaagaaaggccatcagctaaaaccacggcgatgccgcctgcactgatgttataagatagtgtgcggatctcttcctcatttcccggctgaatttgcacatctaataccgcatcagttcttacatattggcggcgctggattcttttcattttttcacggggaggcacttcaagacagatcatttgaagtttgtccttcactttaccttttatacggcttataaagcgataaggaacttcgtcttttcccacaaactctaccgttacttccatatcgttatgtaaaatcacagttcgccctgtaactacatcaacaggatacgcgatcaaaagttcattgttttcgatgctgaccgccttgctttttgcctttttcaattcattttcttctatatattctaaaagtacagtttctccaatctctatcattgacttcactctttcgcattcaatatactcacgtttttattaaagcacgtaatgaaaaaaaggaaaagacatttagtcctttcctcctgttttttataggtctttatatataggttctgcattttttagtttttcaaccttttcttccgatccgtctttggcattgatatacattctgaaagtgtcattttcaattgttccaagcatttcgtaacataacacttcttgacctagttcatttgtaatcaaagcgagccttgtttctctcacttgtacatttttatttaatttagactttgcctctgcttcagtaattgcaggcttaggtatggttctttttctgtgagatgtgaggaagtctcttgctgaaaagccgacaacctcaccgtcatccaaggccactttcatacgaattgcctccgggtacatccggactttattttcaacaggaacatatgaaaatacaccgattttatcatattgggcactttcatcaatttccaaatcatctgtttcaaatccgtttttctttaaaaatgcaagcgctcggttcgatccgtcatttaaactgattttctgatctttcacttccctgttttggatcaagtataccggatgcccgcccttcttcgtaatatccatataaatcactgctttatggtctgggtctttcatgctgatgctatatacatcgcgatttgttttttttccgctctttaccactttaattgaataattgtcatctggggcaaagcgctcagcaatttgttttgcttcctgttcggaaatttgttttcccttcagatggctgaagcctttctcttcttttttcgtactggtgaagctcgggccaagatcagtgccagtggagaatgcaccaacatttttttcgactgttttaaagctgttgataatcgtattatcactttgtttttcgtcagaagccagggccatttctacgtccatccagcgaaggtttttgctcatgacaaggtgctgaacatgacgcaattcattttgtatatcttcggactgctgatatagcttatttagtgatgtatactcgtttttatcaagcggcttttggtccaaatctctgactgacgttttatagctgaaatcgccgatctttgataatagctcttcagttttattaaacggcattaatgtaagcggcagctgactgacactgttatgagcttctgatgtaatcctccacacatcgatcaatgcaggcgacagtgatttttggctgttcatggcaagtgttgttccgattttatcatgaagctgatccatctgataggtaagctcatgaaacgcccgctgatagttattttcagcatgaagaagaactgcgtctttttcctggtgttctttgtatccccagtagcctgtaccgactattgcaataccaagcacggcgattaaaattcctctgatcatttatcacacctctttttatgctttctcatatctgctactcacagaaaatgtgtttaccgattcttttaatctgcggacgcccccaaatccacggacttgtagccgtatccggattaaagtagtaaagtgcttcccctgatgggtcccagccattgatggcatccagcactgcttctcgtgccgtttcattcggctgcatgtaaatttgtccgtcggctactgctgtgaaggcaagcggctcaaaaataacccccgctactgaatttggaaataacgggctgttcaaacggtttaaaatgactgctgcaatagcaacctgcccctcgtacggctcgccccgggcttcgccataaaccgcttgagcaagcagcctgatatcgttgttggaaaatccaccaggcatgttcgctgctaccgcatcctgttttcttgcttttgctggtgtattgttttgctgtttattcgcattcgctttaggctgctgcgttgttttttccgcaggctgtttctgccgtgcttctgcttgttgtcttgccttttgtgttgctgcttttgatggtttcgtctgatactttagcggaatttttccgtaatgcgtgaatgtattccctttattgagctgttccatgacatattcacgatagtattttgatttacatattaaggtttgctttgttttagctcctacaaggccgtcaacctcttttaacccgaattgatcctgaaaatttcgaactgcccagtacgtcccccatccataaaccccgtcaatttttccgttataatatccgttgtattgaagacgcgcctgaagctcgaccacatcatccccggttgcccctctttgaatgacctgattcgaaaaggcagagatcgtttcagtattaataaacgccgttattgtaaaggaaaaaaggatgagacatgccataatcgatcctttggacttcatcttttcaagcctcctactgcaaatttttaagtgtaatcgtattttctgtaacgaggttatttttatacactctttccttgttatccctcagaacataaaaactgcacacaaaaaagccgcacggttgctgtgcggcttctatacttgcatcatattaacggaacgggcttttttcgctttacgcaaaccaaaccaccataaaaataccataaatggaagcatataataaatccaattgctaagcgctgttaggataaaatcatatgatccatgcaaaagggatgggaccactaaagaaagagtaagccactttacacgcgccttatcagcggaaaaacgggcttttccaaggtaaaatcccattataacgccaatcaaggcatggcatgaaacaggcagcagcgccctgacaaacgcatgctccacgccgtggccaattaaataaagaatattttcgagggttgcaaaaccgagtgatacacttgtaccgtacacaatcccgtcataatgctcatcaaagtgggcgtgcgggtaaacactgatcatcagtataaaccattttaatgattcctccaaaaaccccgaagataaaaaagaaacgaaaaagcttccgcctcctacattctctttttcaagtacatactggataaacattatgggaaatacaagaacaaccccgagaaaaaacgaccgtagcaccatatgtacaggttcattatcatactgatcttttaaataaaaataacttaataacgcgatgccgggggcaattcctgcagagatgattgcaaacatcaggcaacctctttcctttatattcctacgtctatcctaccatgttgtttaaaattttacatctgtctgcacttaaaaaaacataaagagcatacgaatgcatcatatgctcctcatctttaatggttttctcttttggcgatttccgctgcgatatgcccccgtgaaacctgccgttttcaataaatatttcatttgcattgtttcccgcagcaataacaccggcaataaagacaccttcaacgttcgtttccatcgtttcttcgttgaaatatggacgccctgtttctttatcaatttcaacaccaattttttcaagaaattgatgatcaggatgatagcctgtcatggcaaatacaaaatcatttttaatggtaatgagttctttctctccggagcgaaacacaacttcatcctcggtgattttttcgacacaagcgccaaattccatacggattgtaccgtttctgacgagagcttcaaattccggcagaatccacggcttaatgcttggagaatactcattgcccctatataaaactgtgacacgcgccccagatttcacgagttcaagggcggcgtccacgcttgaatttttcccgccgatgacaacaacatctttatcaaaatacgggtggccttctttaaaataatgaaatactttcggcaaatcctcaccgggtatattcatatagtttggatgatcataatagcctgtggcgatgatacaatatggcgtcgtgtaggtctcttttgacgtctcaataacgaatgtgtttttttgcgttttcgtcactttatgcaccatttcaaacgcattaacacggatgtttttccgtttaacgacttcccggtaatacgataaagcctggattctgacaggcttcctgttctctgtaataaatgccacatctccgatttcgagcttttcacttgagctgaaaaaggtttgatgcgtcggataattgtaaatactgttaacgacattgcctttttcaatgacgagggcatcaatgccaatttgttttaggtgtatggcagcagatagtccacaaggtcctccgcctataataattgctttttcttgaatcatttctgtcaactcctgcgattggcatttcacttcatattttctatttccgaataaaaaaatctcctattttatcataggagattttttatttttatgcaaatcatcaacttatatccagcctctaaaacgcgaagcttcagccattttgcgaacgccgaccatatatgcagcgagcctcatgtcaattcttcggttgttagccatttcgtaaatattgttaaatgatttgaccatcattttttctaatttttcttctacctcttcttcactccagtagaagccttggttattctgaacccattcaaaataagaaactgttacgccaccggcacttgccagcacgtctggtacaagcagaatgtcccggtctgaaagaatttttgttccttcaagcgttgttggtccattcgctgcttcaacgacaattttagcccggatattatgggcattttcttctgtaatttgattttcaatcgcagcaggaacgagaatatcacaatccagctccagcagctcttggttggtaatggtatcgttgaaaagctttgttacagtaccgaagctgtcgcgtcggtcgagtaaataatcgatatcaaggccttccggatcataaagtccgccatacgcatctgagatgccgacaacttttgcccccgcatcatgcataaattttgccaaatagcttcccgcgtttccgaagccttggacaacgacacgcgcacctttaatatcgatgcctctcttcttagccgcttctttaatacagatggtaacaccttttgctgtcgcagattctctcccgtgagatccgccaagcacaagcggtttgcctgtaataaatccaggcgaattaaattcatcaattcttgaatactcatccatcatccaagccatgatttgtgagtttgtaaatacatccggtgccggcacgtcttttgtcgggccgacaatttggctgattgctctgacataccctctgctcagacgctccagctctctaaacgacatatcccttggatcacaaacaattccgcctttaccaccgccatatggaagatcaattatgccgcattttaaactcatccaaattgaaagcgccttcacctctttttctgttacgttcgggtgaaaacgtatcccgcctttcgttggaccgacagagtcattgtgctgcgcacgatatcctgtgaaaatctttactgaaccgtcgtccatacgaacaggtatttttaccgttaataatctcatcggctcttttaacaattcgtatacctcttcgggatatcccaatttttccagagccttatgtattacggtttgggttgattttaatacatcaagtttgtcctcttctgtatgaccggtgtttcgatcggctgccatttgagttaacctcctagaatcttctgtttctcacatgctccctttcagagaatagtatacaccttcatatgatctgtgcatagaataaacgttatgtttttccatgttttttaacgaaaaaaaactgctgaaatcagcagttttccgttgcattcttatgaaaaatgagtttgtatcgtctctacggcattaccgtccataatgagcttaccatactcttgcaggcgataaatcgttaaagttgtcggattgccgtattcagccagaaccgccacaaccccttcagccgtatgtgaccctagatcttcaaggcttaaaaagtactgcccgtcatagtggtagacagttccccctgtgataccgattcgctgtaagctttctgaaagctgaatgatatcttcaaaggaatggaattgatatatgatgtccgcgctttcatcaagcttgacttgcatttcgatgtaatcatcatcatactcatcgtcttctgaatcggcgtcttggttctttgttacaatcacgaccatcccttgtgcttggagagaatacacttccactgcaatcggtccattcgcttcaaagccgagctctgtatttgcttcattcatcatatctttaaataactggtggactttgaatgagtccttccagaggtcttcttttgtcaatccccggtctgtcaaatcatcgagggttaaaaagattttgatcttattataattcagacgctcaagccgcataacgttccctcctgcctctacttgcacacaaatcatataacacattatatgagatgatgagtcataggttcttaattgttatcagtttacactgagttcactagtaagacaagcacaatgcagtttttattgccatatggatttttgctttttagaagttattctggcccgcaaagagtcacaatgtgtgtttcaggctcagcacctaaacgaagaggcacttttgtcgtgccgtagccgttgctgatcagatatgccgcgtttttaacaatacctgttttccccagttcataaggaccgaattttccaaacctgatctggcctccatgggtatgtccgctgagtatcacatcaataccgtcatcttcattgatttgttcatgaatctccggattatggcaaaccagaatattcagctggctttcatcaagttctttgatggcttcttcataatgatccatctccatcctgatatcatcaacccccgcaatcgcaatcgtatgcccattgtatgaaaacgggactgactcatttctcagagtgatgacgccgtgcgctttaaatatggaatacagcttatgctgcctgacttcataatcattattcccccacacaaacacgatagggaccccgaaatgtacgagccttttgatgttttcctcgattctcgcactgggcaccccgccctcagctaaatcaccgccgattataaccaagtggggggcatggcttcgcgctttttctaaaaggtcttgatcgatgagacgtttgtgaatgtctgaaataaaaaagattgtcagaggcggcttgcccttcatctttgataaaggaaacgtatgtgtcttcaaatgattgccttttgctgttgcatacatttttgccgtcattgccgctgccgcaacagttagtacaccggcaattttcactgatagcttcataaaaaaactctccattctttttagaacttatcaataagacggacaataaaaaaaagacgtttctatcgtttgagaaaacgccccattttatttactttcaaaatatagattaatgtcatatttgtgcttcatcatatgaaaaacagactctctcgccttccatttatcgggctgcggccagagatcagtgcttttctgaataatttcacatctcagtttatggaaatcagtctcggatttttcttcctttttcttgaaataatatgaagtacagtaggcaaaagcggttgccagcatccaaaataaataaaaggtatggctaagtatttcttgaagtataagctgaggctccgggcttttgatcatgatcataacacataataagcctaggcagataagtgaagcccatcgccatctgcggcattgtgctgcataattttcgaatttttgttttcgttttaccagcgcttggagcatctgtttggtcggcgcgtctgtaaactgatccagctgattccataaggattccatacgcttcacaccttgtccattttcattgctacaatatatgaacgtaaaataaaaataataccctattcatccattaaggggatgtccaaaacttgtccggtgtaaacatcatttccattcagatgattatacgctcgaattttttcttctcctgtccggcttttataatacttcatggaaatgcggtatagcgtttctttcttttggacggtgtgcttgacaacgcgattcggcacattttgaactggctcagctggctgttcttgctgttgtactgttgattgggaagaggaagcagccgcggcggttgcttcctccttatttgccgagtcttctttatccgctacagcagtctgtttcttatcagcagctgtttttgccggctcttttggcttggaatcttcaggctcttgttttgactccttctgcagtgcggtttctttagtgtctgcggtatcgtttttatcctctgatttcgggacaacctcatatttgctttggctgctgtcaataaaaacatcttcataatcgtcatgattatccgggtggctctttagataaaataaggtgactaaaacgataaccggcacaaatacaaatattactgcgagtactgtgaataatggcgtttttgttttgccttgcttttttttctgttctctttgattttttacagattgtcttgtcggaaggctttctccatcatcgacataatcgtccgccaatgcggcgttttgatcttcataaagattctgggcttttcttctctctactctcgacatgttcgtcatgtttatccctcctcacatgttcaaaacgaatctgacaggcaaacacggcatcaatgataaaatgcgccgtcatcggaacaaataagttgccggtccattcatacatcagaccgagcaaaaagctgattgctgtcaccataataaataacagccattttgacaaataccgaaagtgcagagcggcaaatataaggctggccgcccataaaccgatatgagtctgcagcactcctctgaataacatttcttccgcgaaagcaatcagaagcgttaaaaatataatatgagggattgacctcttactgaatatttttttattgattccgccgtcatcatataaatgagacggaaaccatttcattactgccatatcggctaaaataacaataacagctatagaaacaccataccagatgattcgcatatcgcgaatgtcccagagctttaatacgtcccgtacatcctcaaaaaagaacagtcctgctgcagcagcggcaaagatgatgagtagctgcgtcaaatataactgcttcagcatatcacggtcagacatatgctgaatataatctttttgctgtttcagttcagctcacctacagtctgcaagctgaatatccggtgcaattccgaactccagctgtctaatggcgccattttactccgttcccctttttgttcatacaaggataaatcaaaaccgcaatgtgaacagcacgggaggtttccgtcatcaggctcgtatgattcatcaaagtaggttaatagtgcctgccttaaacagccatcacgctgaagcaaaaatgatacacggtgcattttttccagcttcagctccatgcgatatgaaatttctttcttcatcagttcaactgatgttttcccctgcataaagagatgaatcatcatacgggcctgtgtctctccgacgccatactgaagtaatacgtcacgaagccttctctcatcccgctcctccgtcttctctagcacacggatcacgtcggcgatttcttcagctgtgacactctccatctggataatctgttcctgcaattcaaaatcccctggcgcccgcagcaaaatgctgacactcggctttccgtcgcggcccgctctgccgatttcctgcataaaagcttctgccgtctgcgggaggtgaaaatgaatcacatatctgatatcgggtttatcgacacccattccaaacgcattcgtacaacatatcacatcaagctggttatgaataaactgctgctgaattaaaatccggtcccctgactccaaaccgccatggtaaaagtcggctctgctgctcgttttgctattaatttcacccgctaattcctcggcccatttccgtgtcggacaataaacaattcccgggccttgcagattttcaaccagctgaatgaccctatctattttttcggcagtatccgccgcattttcaaccctcagtgcgatgtttgggcggttgactgagttgagatggcgtacagcatgctgcagctccagcaggttcatgacatcttgcagcgtttcctttgtagccgtggcggtcaatgccagaacgggcgggtgaccaagtttttttctcagctgcccgagctttgaataatcaggcctgaagtcgtgtccccattcagaaatacaatgcgcttcgtcaataacaaataggctgatcgggacgcttttcaatttttccaatacatatggagactgtaaagcttcaggagacaagtacaaaaatttatatcgatgaatatgttctaaaacaaattgtctttcctgcctgttaagcatgctgttcaaagctgcagcacgcttttccccccgggctttgagctgctgcacctgatcctccattaaagaaagcagtggagaaacgattaataccatgccgtcaagcatataaccaggcagctggtagcaaagcgatttccctcccccagtcgggagcattgcaatggtatccttcccgctgagtatgctttcaataatgtcctgctgcccttttttaaaggaagtaaaaccaaaaaactgatataacgtttgctgtaatttagtcatattgctgcacctgctttgtcaatgccagtctgatttgaaagtagctgaaccgctgttccagcccgtcgcgaatttgtttgattttattcgtccgcatccgtttggcaaactctgcgatttgaagctggtcttctgctgatacatagtcattaatcataaacgcaggctcatggagagaaatctcgacaatgtggtcttcaatcgtcgctgttttcagctttctgatttcagcaattcgctgtatcggaaacccttgtttgaccatctgccatgttttcctcgtcgactctgtcagggcattatctaagtgcacatcagaaaggagatcctttaacaaagcatcttcacactccggaagagaatgaataaaataatgtaccgaagcccaaaacatgatatagacataccattcgtcttctttcagcgtatcagcaagctgcctgctcgtataaccgatccgatggtgcgaggttaaggagtagacaaaaatttgcgctgctttgttttcaatctttttcaaatgcgcctcaagcatggcaaaaaggctttttgccatctctatatgatccgtatgccgggacaggtatttctttacccagtgaagtgtcttatgatcctttgtgacagggatatactgcctgctcccttgctgtttatgggataggacctgcacaagcagcgaaagccttttccaaagcacgccggcagcctgctgataatgagcgccgtgacaatgaacgggccaaggccgctcgctaagggcatgtctcaaaactgctgcgccgctggctgtcactttgtatgtatctgattcagacattggcgcgagatatgaatgcttttcaagcttgtcaagcgacgcagaaatatcgcttctcgaacattttgccgccattccaaagtattttgcagtctgaaataagccggcatcttgaatggtctgtgacgatctcttgcctttgaataggtgaaaaacagcgcttcccgaccgttccccgtttattttgcaaagacaatcgagaaccataatatcgaagtaatttaatgacaacctatccacctacattcttcctgacaaaaatcgttgatttgctctttttattttaacagatttcaaacagaaatcgacgtttaaagtcatcattaagggggatgttatgtagataaccccttatgtgataagcattctcaatcatttttctgttgaaatgtggcagcaacatcattacaataagtaagaggaataggtgttaaattgattaaatataaagattgatccatttgttccaccaagaacaatctgggaggttttattcatggcaaagtacacaatcgtagacaaagatacatgtattgcatgcggcgcttgcggagctgctgcaccagacatttacgattacgatgatgaaggcatcgcgttcgtaacgcttgatgaaaacaaaggtgttgtcgaagttcctgaggtactggaagaagatatgattgacgcatttgaaggatgccctactgattccatcaaagtggcggatgagccatttgaaggcgacccgcttaaatttgaatagaagtaactaaaaaaagctcccgaacgggagctttttttagttaatggatatgtgcacttcgctgctgctcaatccatggcttaagcttgataaaaattagtgagaatacaaccgtaattacaataccttttatcatgttaaacggcaggatacctgcgacgactgctgtttttagcgcgctgtcggataatgccggtgaatgtaaaaaccatgtgtatgccggaagaattagaacataatttaaaatactcattaaaatggtcatcgctgcagttcccaaaagcaggctgacagccaagccctttgctgagttgagttttttaaataagaaagcagtcggtaatataaagagtgttcctgcaataaaattcgcaatttgccctacaggaactccggccatgcttccctgaatgatatactgaagaacattttttatcgcttctacggcaatacccgccaaaggtccgtaaatcagaatggcaataatagcgggaacgtcgctaaaatcgatttttaaataatccggaagacccggaaacgggaaatttaacagcatcaaaacaaatgcaatgctgctcagcatgctgaccacaactaatttttttactttcacttcattctctccttttcgatcacatcttactcgaaaacggaaaggttcttttccagccaataaaaaaaccgcttcatatataaaagcggggtttcgaaaattaggctaggcaaagaaacgtttgaaaaattcaatttcaaaacgcttatgaacctccatcttctcccatccagactgtactgtcggctccggaatctcaccgaatcctgctgtaaagacagctcgcgggcttagagccattggctcatcaccgccggtagggaatttcaccctgccccgaagattgatcatatgaaatttaattacattataaacgataactggttggctgtatagagaattgcttcaaattaaatatattacctgcaagctatcagatcattgatttattaggctttacttttatcctttactgcgtcaatacacgttgacactcttttgagaatatgttaaattatcagatatttagtttgtcaatttaggaggaaatctaacgatgtttcgagtattggtctcagacaaaatgagcaacgacggtttacagccacttattgaatcagactttattgaaatcgttcaaaaaaacgtagcagatgcagaagatgaattacatacttttgatgctcttttggtgcgaagcgcgacaaaagtaacagaagaccttttcaacaaaatgacttctttaaaaattgtcggaagagccggtgtcggtgtcgataatatcgatattgatgaggctacgaaacacggggtaatcgtgatcaatgctccgaacggcaacaccatttcgacagctgagcatacatttgcaatgatctcttctttaatgagacacattccgcaggctaatatctcagtgaaatccagagagtggaaccgcacagcttatgtcggttcagagctttatgggaaaacgcttggtattgtaggattaggccgaatcggaagtgaaattgcacagcgtgcgagagcgttcggtatgactgtgcacgtttttgatcctttcttaacggaagaaagagcgaaaaaaatcggcgtaaacagccgtacatttgaagaagtgcttgaaagtgcggatatcattaccgttcacacgcctttaacaaaagaaacaaaaggcttattgaataaagaaacgattgcaaaaacgaaaaaaggcgttcgcttaattaactgtgcgcgaggcggaattatcgatgaagcagcacttctcgaagctttggaaaacgggcatgttgcgggagcagcgcttgacgttttcgaagtcgaaccgccagttgacaacaaacttgttgatcatccattagtcattgccactcctcacttgggagcatcaacgaaagaagcacagctcaatgtcgctgcccaagtgtcagaagaagttctgcagttcgcaaaaggcctgcctgtcatgtcagctatcaacctgcctgccatgacaaaagatgaatttgctaaaattaagccttaccatcaaattgcaggaaaaattggcagccttgtatcacagtgcatgaaagaaccagtacaggatgttgccattcaatatgaaggcacaattgctaaacttgaaacatcgttcattacaaaagcccttctgtcaggctttttaaaaccgcgcgtagactctactgttaatgaggtcaatgccgggggtgtcgcaaaagaacgcggcatcagcttcagtgaaaaaatttcctcttctgaatctggatacgataactgcatcagcgtaaaagtgacaggagaccgcagcacctttactgtaacggctacgtatattcctcatttcggagaacgaattgtcgagatcaatggatttaatattgatttttatccgacaggtcacttggtgtatatccagcatcaagatacaacaggtgtcatcggccgagtaggacgtattctcggagataatgatattaacattgcaactatgcaggttggccgtaaggaaaaaggcggagaagccatcatgatgctttcctttgacagacatctggaagataaaattgtgaaagaactaacaaatgtccctgatattgtgtctgtgaagctcattgatctgccctaatcaaaaaaactcaagctatctatatagcttgagtttttttatttctatccccgtgtgtttttatgcaaaatatctaagacactccttagctcagaaacaggaatttggcctggtgcggacgcctcttctccagctccaaaagtacaagccgatccaaaaacctcaccgctcagcctgctgatgagccctgttgcagccattgacattgtaataatggggcggtctgcatattttgttttcattgtatacgtcgcatcaagcagtgttaggagatctccagtatcattcggcatgacagccatttttggaatatgcgcgcctaagtcctgcatttttcgaagtctggaaataatttcatcttttacaggtgttttttcaaagtcgtgatttgacatcaccacatagacgttgttttcttccgccagcgatactaacgcctttacatttgcatctcctgaaaataattcgatgtctatcagatcgatgtcttttgtttggattgccgattctagcaaagcaagataggaactttcgtccatctccatgctcccgccctctttgtgggttctgaatgtaaatagaaatagcttgtcttctaaagatttacgaagcttagaaatgagctttgtgaccgcttctctgtcattcgctttttcaaatacgtcgactctccattcaacaatgtccggattcagtaattttactgcctctgcttcattcagaatttgtttttccgtctttcccatcagcggaacgatgattttcggcattccttccccgatggaaactcctttaattgttaacacgttcactcatctcaaatcctttcaatcgttaccttgttttattatacacgtacaacttttttttgaaaatttctattatatgaatagcaactaaaaaagagcctcaaagggcccattttagtttaagaaaatcggatttggagcagccggtaccggaattgcatctgatacgtcatatttgccgattttgtttgttctggtttcggtaaaggtcacttctgtgaagccaaactcttttgcggttaaaagaagtccctcaatcattaaaatactggcaatagaatcctcaacttctgagtcctttgagaaacggatatataagtgcttctgtttcttcgttacagattggacagtacccgcttgaataagcggtgttgtatctttttgactgctcgattccatttccttaatcgcttcttttactgtatcaaaagaatgatttgacggaacgagaaagtcttgtccttgtttattttggtacaagtagtaggatcgttttgactgtttgggaatcgaaatttccgtaaaagtgccatatgagccaatccgaaccccagtctcattttgatccgataaaaatttgactttttcataaggactccattttaaggattctttaagcaatttttttaacagtgtatcatcttttacagaaaatgccgtagctggctgatggactcgtatacttaattccttctgctttggtttttcttttatttctacttcatctatgaaggatggaattgtaatggcatgatccaagatatccaattcactacttacagtcagcatgtcctggatcgtttggtatgcatttgttttttgaatgctgacgggtataattgcagatgtatcggcatcagcaactgctacagtgatgtaattgtcttgttccttttcaggtacaacaaacgatgtatgatccagggatgatgcagcttttgggctgtcttctgtctcagttttcgttactgcgttctcttgggacgcttctttttgttgaggctgtgcctgatcaaagaaatgaggagaaataatgaaggcgatataaaccgcaattgcagcggcacacgcggggccaatccacctgacagcgggcttatttttacgctttgccatcgtcagccgcttgtaaatatcctgaggcgaacgatggtctttaactgccggaagttgacttaacaactcctttatctgttcttcgttccattctgacttcatcatccattagctcctccctcaaaagctccatatgtttccgaagtactttgagccctctgtgttgggtcgtttttactttgctttccgagaagcgcagagccttggctgtttcctgtattgaatatccctgaataaaccgcaagataatcacagctctttgatcgattgtacattgatcaagcgcagcataaatttcccggacattttcatgttgaacggcaagttcgtccggtagcaattgctgatccctgacatcctgtgtatcccagtcaaatgtaccgagtatacgctgtctgattgtttgctgtttacggaaccagtctatcgcaacatggcgtgcgatagacaatagccatgttttttcactgcttcttccttcaaacgtatgataagaatttaatacccggatataaacctcttgaagaaggtcttctgtctggtttttatcctttaccatataaaataaaaattggtacaaatcttgatgatatgtatcatataataattgaaaggtttcttccatttgaaacccctccgttcacttttttgtcgtatgaatagcttgaaaagttacattacaactatattacgagtaactggaatttggaagggaatttatattaacatatccttaaattttattaatgttggctattaaaaaaacacccgctcagtcagcgggtgtttcttatggaacaagattcttcggcaaattcagactcgattttaccgttttgtcggaatataaaaagtaaatgttgttcctttatctattcggctgtgcacagtgattgatccgttgtgggcttccacgatatttttaacgatagccagccctaacccggttcctgctctgccccttgtccgcgctttatctgccttataaaaccgctcaaagataaatggcagatcttcttccggtatgccggacccggagtctttgatatcaattttcaatccatccttcacagaatggactgaaatggagacactgccgccggctgaagtatgccgcagcgcgttatcaatcaaattggtaaatacctgctccatcttgtcttcatcaaacataaattcctcttctgtgagagaaatgtcatgatctaaagcaatatttttttctttcgcaacaccggaaaacttccggatgatcttttctaaaaactcattcacattgattttttcataatgtaagcctgtatggcctgattccattcgggctaaatcaagcaaatcattaactaaacggcccattcggagtgattcgtcataaatgatttgggcaatttctttccggtcttcttcagagcttgcaatgtcatcaacaattgcttcactgtatccctgaagcatggagatcggtgttctcagctcatgactgacatttgcgataaagtcctcccgcagcttatcaaggcggcgttcttctgtcatgtcacgcagtacggcaactgctcctctgacgtgcgattccgcataaagcggcgacatcaaaagcacccatgatctgccttgcagcgtcatctcaatcatttgttctttttcagtgctgacagcgttttgaaacagctcttttgcttcaggcggaaggttgtcgccttctttgatattcatgttctgttcataataccaagcctgaagaaaacgttcagccggcgggttggtcacaagaatcgtaccgtcaatattaatggtaataaccccgtcagccatactgctcaaaatgttagaaagctgctctttttcttgattgagcgcattgatatgaaagttaagctgccggcccatttgattaaaagcggtcgccagttcaccgatttcatcctgagttaaaatcgggatttttgtatcgaacttgcccttcgccaaatcctgcgcgccttctctcatttttcggagagggtacgtgaccctgcttgataaaaagaatgcgaaaaatgtggtcagcacaatcgcaattccagcggcaagaaaaatatagcgggtcgtatgttttgttgtatctttaacggcaagcaaagactgggataaaaagaccatgcctttctttccgtctttttcatacgggacacctacaatcaggcgttcattatccgtgtctgtatcgctcagtcccgtccgtttgcttacttttttatggtctttgagagctttatttaagtctttgtcatgctgtatttgctcaaccgtaatagacgacaggcgatttttatcattcggagaataccagtggttcttctcatcctggatgatggcaatgcttgttaagttatcagcgagttcccaagtgattgaccttgccagtgcctggtcctcgtgattttctaggatgacagcaactttattcgcaagctgtgttaaatcattctcagcttcttccacatggtagttttcaataaactccagcaaaagaaccgttaaaatgaacaatacgatcaagacgagtgaaaggatcgtaaaccacagcttgcctactacgcttttccaaaatttcattcagcgccgacctcaaatttataacctacaccccatactgtgacaatttttttcgcagcttccggagataccttgttcagcttctctctcaagcgtttgacgtgagtgtccactgtccgtaaatcaccaaaaaactcatattgccacacttctttcagaagcttttcccgatcatacaccttgtcaggcgttttcgctaagaaatatagaagctcatactcttttggcgtcaggctcacttctgttccatcagctgttacgcggtgagcatcatggtctattgacagatgtgaaaacacgagcacatttttcgtcggtgtattggcattgaaataagaggtttgggatgctcttctcaaaagggcctttacacgcagcacgacttctctcgggctgaacggcttaacaatataatcatctgttcccgcttcaaacccctgcacccggtttgcttcttctccttttgcggtcagcatgataatgggtgtcgcttttttttcacgaatttgccggcacacttcaattccatcagtccccggcatcatcagatcaagcaaaattaagtcataattggcttcaagccctttggcaatggcttcatcaccattttcagcttcatctatagcataattttcacgttcaagatacattcttaaaaggcggcgaattctggcttcgtcatcaactactaatatttttgtttcgttcgtttggtccatgttttccccctgctttccttctgttactttcattttatcaaatcgtgagaaagtttgagaactgtgtcgctttcaaaggactatgcataagaatgaagtccggcaagcacaagatttacgaatattaaattaaacataataatagcaaaaccgattacggccagccatgctgacttctcaccgtgccagcctcttgacagtcttaagtgcaagtaagcggcatagaacaaaaacgtgatcagcgcccatacttccttagggtcccagccccaaaatctggtccaggcgagctgagcccaaatcattgcaaagatcagcgcgccgagtgtaaagatcggaaatccgattgatacggccctgtacccaacctcatccaccagatcaagattgacgtttttcaccagcggatgtaatagagcgctgattctttttctgatgatcagacggagagccccatacaacacaagacctgctccaaatgaccaaatgacagtgttcacttttctgcctgagaaaagcgcgggaagatcaacaagcggttccattcttccttcggtcaaaagctctccctgatgcggaccgacaagcgcgggcatttcgtacaccatcacgtttttttctttacttttgtccacccagttaaactccgcttcatagcctgcaagacgaaatgctgatgtgattgcaataaaggcgacggttgtgaccaggataaacataatcgcttcaagccagaaggtctttttgcttggctttgtctggtctacatgcttcaaaagaaagatgacaccagcgacaaagctgatggcaagtatagcttgcccaagcgcggccgttgttacgtgaatatacagccagttactttggagcgaaggaattaaaggcgagatatctgtcggaaacatgctggcgtaggcaatcagcaataaagcaattgacagcgtaaacaggcctaatgaaggcaatctatagagaaaataaagaatgataaacgccaaaacaagcatcatgccaaaagcggtggtgaattcaaacatattgctgaccggcgcatggccgctggcagcccaccttgtgatgaaatatccaaggtggcagaaaaaaccgacaatagaaagggtgattccaatgttggcccatcggtttggcctgccctttttatctttattcccgcgtatggccccgccgaagattgggacagcgattaaatacacaagaaaggccgcataaagaaaatttccgctcagctctgccatgacatcactcccttttcgcctatttctgtgttttgattaattctttttggtccaccggttcagtcagtccggaatcagccaatataaatgctaaatccttcttcaggccaaaccagtttttattggtatgccccgctaccataactgcaccgtcctgtgagtgcagccaaattcttcgatgctgccagtacataccttgaataacaccgatcataaaaatggctccgccgacagcaagcacccagagtgtcagatcctttctgactgtaagtccagtaatgtttttcgtttcgacatggtcaaatttcagcttgtatttattattgcctgatccttcgatggtttcttggatggcgacaaagctcttttcgcctttcggtttgtccggcgttatgatattaaagacaaaagccggattgttagggatctttgtttttgtgctcggctctccgtcctgattaaagtagaagtctggcaggtagctggcgatttccaccttgtaaccgttgccaagatcatagaccgaatctggatccagaaggttgatcttcaggctcccaaaggatttttttgtttttttatcaatcagctggaacaccatttggtcaagctgattctctttgtaatccacctggtaaacggaaaaagaatcaaaacgcagcggctgattgacacggatgtcttcttctgttacttttttcagcttcggcttctcgccataaacaattttcccttctctcttgtagagtacggcatcggtttgaaagttctttgccactctaccgtccccgactctgtcaatggcatctgcaaatacctttttttccgttttgctgttataggtctctacgctgaattgattgtttttcaaataatatttcccgtctgtacccggaattgctgcggtttcgccttctctgacccaaagcgtctcatcgacatacatgccaggcacaaatctcagcatcgcaccaaccagaaagatgattaatccaatgtggttgacatacgggccccagcgggaaaagcgtcctttttcagcaagaatgctgccctctttttctctgattctataatgttttttctttaatagagcaactatcttttctttcgattccccgttcagtacagtaaccgtttcactgaacaagcgctgcctttttaaaaaagccgggctccttctgacgccttggttttttaacgctctgtacaacggaatgacccgatcaaggctgcaaatcacgagtgaaatgccgatcgaggcaatgagcagcaaataccaccaagaaccatataaatgatgaaaccctagcaaataataaagctggccgaacgtgccatactgctccttgtaataagtatcagcctgtgcgcccggaggcagataggcttcctggggaaaaatggtgccgaacgctgatgcggcaagggttatgacgataagccatattcccaccttaaccgaggaaaagaaattccaaattttgtcgataatcgttttgttataggtttgcgaacgtcttgcgcttccgtcatatctcatatcagcgagcggaggttgagtttcctgaagagctcttccgcacgattcgcataaaacggttccaaccgggtttatatgtccgcattcacatttgacttgcttcatcccgaagtctctccaggttttatgagattcatatattcgtgtatcatgctttctgtcatagtgccggtcaccaccttgacaacttttccttccggattgatcaaaaaggttgtcggaagcggagatacgtcataggcatcaagcacttggcgatctgtatccagaacaaccgggaaattgactccgtaggatttcataaaattatgtactgctatctttgactccccaacatttacagcgacaatttcaacaccttggcttttaaaatgcttatattggtttgccatataaggaaactcttttttgcacggttcacaccatgtaccccagaaattcaaaaaaacacctttcccttttaagtcactgagctcgatacgtttcccattcgtatcctcaaggacaaaattcggtgcgtcggacccttcggatatactctctttgccggcaaatacagcgttgtaaatggtatagccgagtgcgcagattaaaacgagaaggatgccggtccgaatgaataaacgcctttttttcttcattgtccactgcccccttccccctattgcagatccattcaattatatcattgcacgttcatttcacatttcttactttttgaaggttatgtgaaatttagaaagcgtttttaccgtgatccgccagtgctctgagcctttttacttcgtgaggcgtaagctctctggcatcgcccgtgtgcaggcctcgcaggtttaaaaacgcgtattcctcacgcttcagcttgattacctcatgtccgatcgcttcaaacatgcggcgcacctgtctgttgcgtccctcatggatcgtcagctgaataatgcttgtctgctttttcttatccaaagacagcagcttcgctttagcaggcgctgttttgccttcctccagcctaattccgcgctccaactttctgagcagctctttaggcgggattcctttcaccttcgccacgtatgttttgtctatttcatacttaggatgcattagcttattggcgaattcgccgtcattggttaaaagcaaaagaccgctcgtatcatagtccagacgcccaatcggataaatgcgctgcggaatatttttaaaaaagtccgtcaccactttgcgtcctttatcatcttgcgctgcggaaataacgcctcttggtttatataagagaaagtaaaccggctcttcgcgttcaacctttaacccgtttacctcaatctgatcagaaccggtgaccttaacacctagctctgttactactttgccattcacctttacttttccttctttaatcagctcttctgcctttctgcgcgacgcaactccggcatgagcaatcactttttgcagtctttccatgtctttcacctcaagtattatcttacttttttcaaccttaacaaacaagctttttcaaattcctatgccaaatctaaaaaaaacgccgttttcaggcgctcccaaataataacgtaacgatgatgatagatgcaactacgccgattaaatctgcaagaagtcccacctttaatgcatcacccatttttttaatgccgactgctccgaaatacacagtcagtacgtaaagcgttgtatctgtagatccctgcatgacggaagccagcctgccgataaaggaatcgggcccgtatactgcaattaaatcggtcgtcattccaagtgcggccgtaccggagatcgggcggatcagagcaagcggcactacttcagcagggatgccgatagcggagaaagccggttttaaaagatccattataaaatcaagcgcgcctgatgatctgaaaacagttatagcgacaagcattccgactaaataggggataatggaaaaggcaatttctatcccctctttcccgccttcgacaaacgattcatatgtgggaacctttttgatcgttccataaagaagaattccggcaataatgattggaatcatggctaaagacagccagttgatgatttccatccgctcaccttcccttctttttgcggcggtaataaaaataccgatcaatgataatggcaccgattccggaaataagcgttgccaaaatgcttggcccgacgatatctgtcggcgttttggaggaataagccattcggacagcgatcaccgttgtcgggatgagtgtgatgcaggacgtattaacagctaaaaaagtaatcatcgaccggcttgcttccgatcggtttccgttcagctttttcatttgttccattgctttaatgccaagcggagttgctgcatttccgaggccgaagaaattcgccataagattagataaaatatagcccatcgccgggtgatccggcggtatatcagggaacagtttagatataaaaggtctgcacatccggctgaaaatatccaaaagccctgactgctcggcgattttcattaagccaagccagaaaacaagcacgctcatcaatccaaatgagatcgtaatcgcttctttcgcacccttaaacacggcttcatttacatcttgcagagttccgttgcacatcgcaaaaacgagtccgatcacggttaaactgacccaaattatattgaccattttgctccgcctgccgcattcagaaagattgatttaaacgtttcaaaaaattgtttcttcggtttttgatgccgctcattttcataatagatcggcacttttgcgatggttgcatcgttgaacatgatctccatgtgccctacgatgtcagggattttcgaggcatctttttcccatgcttttttcggcttgagcagtgtggtattaatttttacattttctttttcctcttcggtcagtaaataggtgatatcacgtttgataaaagccttcgattcataaaatgtgcctttcagctttggaatatcccctttttttgcaattaaataggtttgataatgctcaaacacatagttaaacatcttcatatggtcatcccaatcattagggtcattaatggtgacggctatcaggtcaatgccgtcctttgaagccgtagagaccagtgtccgttttgcaagttttgtatagcctgtttttcctcctgtgctgtacggataaagcatggtcagcagtttgtttttgtttttccatacgctttccatcgtttccgctttgtatatttttgtgcctgaaatcttttgatagtctttcagcttcatagcatacttagttaaaatggccatgtcataggctgttgaataatgattttcatggtcgtccaatccgtgcgggttttgaaaacgggtgtttttcataccaagctgctcggctttttgattcatcatataaacaaacccatcgaggctcccaccgacatgctcagcaatcgcgacagcggcatcgtttcctgatcttagcatcaggccatacacaagatctttcagcttcactttttgaccttctgttaaataaatggcggagccttctgttctgacagcatttgccgaaaccgtcactgtttgatccattttgccggattcgatggcgaggacggcggtcataatttttgtgatgctcgcgatccgccttttttgatgctcatccttggcatataacactctgcctgacgcaccgtcaataatgatcgcgctttttgcactgacatctatagcagcatgtgctgtattcacatttacggttgcaataagaaaagaaatcatgatcacgaatactgcttttttgaaaatgcgcatgtttgctcacgtccttgtggtggtttgtacaagtttatgcgcatgtccatcagttatgaataacaattatatttctggaagcaaacataaaaaaactctccctgaaaaagggagagtaaacgttatctgattggcgccatgcttgatccggacgcttcgtaatgagccagctcttccctcatcttcagaaaggccgcgctcaacggcaataataattgctcaagcgacgcaggaacagcatgataaaactcaattgcgctgaccccggtataagacgcccggctattttcacaccacgtgtcttttttcggcataaagaactcttcaatgcattggtgatacacattataaagtgttttttccgctctggcttcctgaaaaggctcctgcatcaggagacgacggcacgcttctgcgcctccttcacaaaatactgccattcttctcagagtgctaagcacatcacagcagtatcctttttcaataggcaattcagcctgtaaggactcaagcgtcgtttgatttaggtaatcgttcacggtattgacaaccattgataagaattcgcctgttttttgagtctgcgctcgcacaatcgaatgtcccatttcgtttggtatcttcccctcatgtctttgtctctcacattttgcttctttcatgatagcttcttccttatatcttatgatgatgaaaaagcgcgattcattaaacttctattttatatcttcgaaggtttggttaaagttttcaaaaaataaatctgcttcttcttgaagaacgtcttcttccgcattttcaggcagcggcggaagctcgtccagcgttttcaggccgaattgttcaagaaaagtcggcgtagtaccgtataaaatggcccgccccggaccatcggcacgccctacttcacacaatagcgccttcgcgacaagactgtgtaaaatccgctctgattttactcctctgatttcttcaatttctgctctcgtaattggctgtttgtatgaaacaatggccagtacttctaaagatgcttgagaaaggccctttgacggcacttcaatcagttttttcaagtaaggcgcaaagtcttttttggtagagagcatgtacgtatctgcatactcaataagttcaatccctcgtgtatctccgcggtattcgtccgccacatccgccatgatcgtgttcagttcaggctcttcgatttcaagcactgttaacagctgcttttttgtaagcccttcatcgcctgccgcataaagaagggcttccacaatagctttccaattcacgatatcaagccccatgaatggattcactccccgtaatgtaaatatctgaaaaattgtgctcctgttcaatgaggaccagctgatttttcatcagctcaagaacagctagaaaggtcactactaaatgttctttttgttcatatggaaacagatccataaagttgattctcgttcctctagatttcaagctgtgcacgatttcgttcattctggcttcgattggtatgtcctgtcttgtaattgttgtttccatcggcctgtttatttttttgcgtttcagcactttttgaaaagctccgatcatatcatagaccgtgacagagagcttttgctcagactgttttacttcttttgcatattcactcaaatcactcggcggtttcgtgaacgatttttgtctttcttcttcccgttcttttaaatccttcgccgcatctttatattttcgatactcaatcagcttttcaatcagttcctcccgcggatcttcttcttcaagtaattcatcttcaaaaagctcctcctcttgcttcgggagcagcattctgcttttaatgctgagcagcgtggcagccataaccaaatactcgctggccatatcgagctcaagcacacgcatcgtatgtacatataataaatattgttcagtgatcttcgccacaggtatatcatatatgtcaatttcaagacgattgattaaatgaagcagcaggtccaatgggccctcaaacgtatcaattttcacttgatattcttccatcatctcaccattttcaagtatcactctcattgccggaaaaactggctaccctatagtataagccaccaaaaagctctcgtccaatactatttcatttcctgttttgaacaagtttgtacagaatattcaaaacacgagaggtgtttgctcggagcgcagaagcgggagaaaaagccttagcttctggttttcctttctaagaagcaatagaggccgagcgttcttttttccttttatcccttctatggtacactaaaagcacattaaaggaggaagcaccttgtatccgaaagcttatatagattatctcgttgagtttcacgcgacacgggattattttgaatgccatgaaatattagaagaatattggaaggaagatccgccaaagaaacgaaaacgctattgggtgggctttattcagcttgcagttgctttatatcatcacagaaggcagaatacagccggggcaaaaagactgatggcgaacagcatccggattcttcaagcagaacaccgggcagtcgaagacttagggcttgatcatggccgtttgctcgaacttatgcaatcggtttacgaacaaatcgaaaccggctctgcctataaaagcattatgctgccaatcaaagatgagaaactggaggaagcatgcaggatcgaatgcaggaaaaaaaagtatacatgggggcagcccagtgcactcaggaacatatttcttatcgacaaacatcgtttgcgggatcggactgacgtcatccgtgaacgtgaaaaagaaatagaacgcagaaaaaaaagcagagactgatcacagcctctgctcagcgtgtcgacaaaccctcgcattcgttgtcaagcctgtgcgttggtgctcacgaatgaaaacattcgctccgctccaatgctcagctttcctagacttcaagggttttcaatcgcgctgaaaggatgacaaaaacctaaaacaaaactgttttcggattttgtcatcaaactaaagcagaggctgatgacagcctctgcttaattattgtatgaaatgtcttgatcctgctgaccttgacaacgttcgaaaaagctctgcgttaattcatttggaaccagtacttgcgttttgaataaatgctttaaagcatccatcatctgttttccgattccttgatggcgatgagaaggattcacactgatatgccggatctcaacctcagaatcctttttttcgactccgattgctccgacgatatcctcgtcctctttccaaagaaagagctggcggtctgtatccgtttcgtagtccttaattgtctgctgaagctgcttaaggtctttttcattcggcataaacgaaagaagccccatcgcaatcttttcaaacgattttttataacgaattaacataaaaacccctctatatccaaaatgtccagtctgctattaacggatacgaataggtgatccgttttctcacattatatcattttcgccatatttttaaactgttttcagcaaattattcaaatgagcggtttaaatttgccatttcaatggcagaaacagcacaatctacacctttgttgcccgcttttgtgccggcacgctcgatagcctgttcgatgttttcagttgttacaattccaaagatgacaggtacaccagtagtgtttgctgcttgcgcgatgccttttgcagcttcattgcagacataatcgtaatgtgtcgtcgcgcctctgatgacagtgcccaatgtgataatagcatcatatttttttgtttccgccatttttttcgcagcaaacggtatttcaaatgcgcctggaacccaagccacatcaatgtcatttgtgtctacaccatgtctgagcagcgcatcttctgctccgctcagcagcttgctcgtaataaaatcattaaatcttcctactacgattccgattttaagacctgtaccaactaaatttccttgtatgatattcatatgattcccatccttttttgtgatatttgtgattagaaatgaagtaaatgacctagcttgttcattttggtttgcaaatattttttattgtgttctttcgcctccatttgaatcggcactctttctgaaatacttagtccgtagccttcaaggcctgcgatttttcgcggattattcgtcaaaagcttcatattccggacaccgaggtcgcgtaaaatttgtgctccgatgccatagttgcgaagatccggcaagaatccaagcgcctcattggcttctacggtgtcataaccttgttcctgaagcttataagcttttaatttattgattaaaccgatgcctcgtccttcttggcgcaagtacagaagcactccacggccttctgcggcaatttggttcagcgcggcgtgcagctgcggtccgcagtcacagcgatgagacccaaacacgtcacctgtgagacattctgagtgcacccggaccaataccggttcttctccgaacggcacctctcccatcacaaatgcgacatgctcttttccatctacctcatttgtgtatccataaaccttaaatgtcccaaaatcagtaggcagcgtaatgtcaacttcacgctcgacaagtgttgtcagattgtaacggtattgaatcaaatccttaatggtgatcatttttaattgatgctttttcgcaatttcaatgagctcaggcactctcgccatcgttccgtcttcattcataatttcacaaatgacgccggctcctggagatccgcaggcttcagcaagatcaacagcagcttctgtatggcccgctcttttcaggacacctccttttttcgcaatcagcggaaaaatgtgccccggacgctgaaaatcagatggcacggatgtgctgtccagcaatgcttgaacggtaaaagatctttcttgagcgctgatacctgtcttcgtttcacgatggtctatacttacggtaaatgcagtgtggtgagaatctgtattatgctccaccatagggtgaagatcaagcctgtctgcgatttcctcactgagcggcgtgcagatcagtcctctcccatgtgtcgccataaagttaatgacttccggcgttgcatgctcggcaagagccacaaagtctccttcattttctctgtcttcatcatctacaacgatgatgacttcgcctttttttaaagcgtccagtgcttcttctatcggatgaaacatgcaaatcttcctctctaaaagccgttttcgcttaagaaggcttttgtaatggtttgttgggtcttattttcattggctttatgcaaaaatcgatacatatattttccgatcatatcgcattcgatattcactttagagccgatcgttttttctgaaaagatcgtttcgctgatcgtatgcggtattaaggagatcgtcactgtgtcttctgtcaggccgaatatggttaagctcacgccatccacagtaattgatccctttaaaaccaatgtttttgttaatgacgggtccatttttaaatcatagtaaactgcgttgcttttctcttcaattcgtgtgatttccgcagttccgtcgacatggcctgagacgaaatggcctccgaaacggccgtttgccgccattgctctttccagatttactttgcttccttttgttaaatcattcagtgacgtagctttgactgtttcaggcataacatccactgtgaattgattttttgtaaaatcagtgaccgtcagacaaatgccgttcactgcaatgctgtcgccaagatgaacatcctctaaaatctttgagcatttaattgttaaggccattgaatgccctgcttttttcatggattcgattgtgcctgtttcttcgataattcctgtaaacatggtcaccatcctattcctttgtcggttttgccgtcagtttgatatcacggccgatttgggttatatcagtaaattgtaataaggggacatctttcattgattgaaaaccttcaccggagattaagctgggagcatgcgttcctccgattagtttaggggcaaaatagaagatgatttcttgaaaacagccttctttgacaaagcttccgtgaacagctgaaccgccttccacatacaccgacatgatgccttcttccgctaggatcttcaaaacatcaggaatttgaatgcgctcggtttcaagtgtaaatatgttcactccgaaagctgaaagccgttttttcttttcctcgtctgcgcgtgccgtcgtaaaaatccatgtcggcgctatttgatcgcaaatcactttagcgtcctcaggaatcgagagtacggtatcaagtatgacccgaaccggctgttttgttacattcggcagtctgcaggttaagcttggattgtcggctttcactgtgccaactccgactaaaatgctttggtgtgttttcctgtattgctgagcatcctgtcttgcagcctctgacgtgatccatttgctgtcacccgtgctggtagctatcttgccgtcaaggctggcagccgcttttagcgtgacgtacggaaggcctgtcctcataaagtgcagaaatttttcattcaggctctccgcctggtctgccaggatgccttcccttacctcaatgccggcttctttcatcatgctgatccctcttccagccacaagcggattaggatctctcatcgccacgaacactcttttgatgccagagttgataatcaattctgcacatggcggtgttttcccgtaatggctgcacggttcgagtgtaacgtaaatgtcggcaccctctgcatgtgctccagccatatggatggcatgaacttctgcatgagcttccccatattttaaatgggcgcccattccgacaatttgtccgtcctttacgacaacagcgccgacgagcggattggattcggtctgtccttcgccctgcttcgcaagatctaaggccagcttcatataatactcttccatttgtttccctcccctcttttgttatttaccgtcaaaaaagccccgaatttataaaaaattcggggctttaggtattttacgcaataggaaataacactatgcatttttgaaccatttgcatagcggttcatcatccttctcccatccagactttcactgtcggcttcagcttaaactgaatccaccgcgtgcttatgcacacgggtcacgggctctaaagcaaatgtgctttactaccgccggtcgggatttccaccctgccccgaaggatacaatctttattcatttgtccttattggctattatagcgatcctttttaaagtacgcaatgaaataaacttacaatttgagaaaaacaaaacatcacccttcgatccgaaaggtgatgttttgttaatcattcacttttgcaaccttgattaatccgtcgatccgctttgatttgctgaagtatgccttaatcttgtcaccttcttttatatcagataaatcctgatttaatttttttccgttgaagatgattttcgttccgttttctgctactccatgatactctgagccgtcaattttcgtcactttatattcctggatggtgtattcctcttcttccgaggacaaggtttgtccaattgctgtcggaacatccttcagctcaacgtcatttatgtacatataaccgcctgcaagtaaaagcaaaagcactaacagaatggtaatcttggtttttattcttcccatttctaaacctccagccaatatgaatctattcattcatatgagttattcctttttttcatgaataaaaaaccgtaaattctcgtaaattattaatataacgatgcataacgggaatatgtttcacatttctgcaaaaatttcttttctatagatatacgaatttatgttctgttttaaggggatgaccgcaaaaaagatataaaaaagcagcctctcgggaagctgcttgatcctaatttgttttgcgcatttcgttaaacgggtagaaaacaaactttgacgtacccgcaatttgttttttcgtgaagaggccaaggccgttacggctgtccatggaattgcgacgattgtcacccatcacaaaatacttgttatcaggcactttaaccgggccgaaatcatcggtcaaatggtcaaaaccgtcctgtttcgctctctttttattagccgccaaataaggttcgtccacctttttcccgttgatatagagctggtcatttttcatctcaaccgtatcgccgggaaggccgataatacgtttgacatagtgaacatcatctccgtttaacacgacgatgtctcctctatcaaactcgccgatgtatttgactgtcatattaacaaaaaccctttcacggttgtgaagtgtaggatacatagagtcaccatcaacgacatacggcgcaaaaataaagttgcggatgagcaaagcaagaacgacagcaatcacaattgcttttgcccattctaatattgactttttcttcgaaacattttctgatttcaactgatttcctccaataaacaacggtcttcaatttatgttatcacgaatcgaaaaaaaatcccattaggaccattgaagtgattttacaaactgttaatcttcatcttctacccacatcatgcctattttttcttgtcgatcataactaggcctgaaaatattgaaagaaatgaatcgcataattcagaagcgatggactcagaagaaagagagttctcatatgcaaaatctttagatcgtatataaagcatgaggttacgggcagtttgttcatttactgcattccattgatctcccagtccatgatacccatggcacttgacaaaacaattaacgtcatgaaggttactggaatgtttgcggcaacctatttcacaggtgataaccgcaccccgttttttgctttcataatatgtttaaaatcattcaagctcgaaaacatggatcagcctccaaaaaataaatccaatatattcccggcagttgaagactctttattataaaactctgaatatccgcagttcttacagtaaaccactagaaatcggttatgctgcacgtcaaacagctttgataatcccgtgccggttgtggctatttctttttgtccggcttcagtactgccgcattttatacagcctttgttgtccataccgcgatctccttttcattacatcacgtttgtttgatttattttactacaaaataccaatcccaatgaaccgtactactttaaagtttgcttaattttgatcccccgttctttacatactaattgggttcgtttctcagcttggtaaatcttctggagaaacggaaaagctccatgaccaaaacatttaaacccagccaaacaccgccgaaggcgcaacccgcagcaacatcactcggatactgctcattaacgcgtacacacgatcagcccgatgaggaataaaacgataatcatcaaaaaacgcaacagtttgcagacgagccttgtgagaatgacgaacaaaaagataagcacaaaaaccaaaaatgacaaatgccgttaacgtctgttcgctcgggaatggatataatacatgactttccaaaggagcgtgaacaggatgaagggaatgaaagagccgtctaattccctctccataaagctctcgcaccaacgactaggaaaaataagaaagagagttcgattttccggtcttgccctttgaatactgtccaaagaaaagttagaacaataactgctaacagaacatctctagacgcaaaagctttctgaattgcagctgggcccagtctatacccgatccaatacgacatgctcactcccgcacagctccccaatccggccgctaacatgcttagcacccagtttaacttttcttgaaacacgagaacaccggcaaactctcctggtccaagtaaagatagaaactctaacatcaagacaataaacaagacggcatatccgtactgttcgagcaaccccgtcaaaacttgcatgtcattctccttaaacttttttgttcttttatcattcccaatccactttttgtataatcagcacaatttcaccttcagtcgtccaacaacattgtctatggcgggatcttctctcctatactcgtcactcatacattcttttttgacataggaggagcaatagcatgaaatgggaggaaacaaaagatacacagggagtttgccaaaattttgggcagttcgttctgccaccgagtcaggtgtttgtttgcctacctcattccttggccattccccattttccccgtttgaggttcgcaatgataaagtatttcacttagtttcgtacatgaagaggtaaattctttgctcaccgaactatgatagctgcgcatgatgattactgcattgcataaccactggttatttagtgagccgtgagcaatgtatatgcactttgagtcagcacaggatgatcctattacattcgccagaaaagcagctgccgcattcagagtagttaaaagaatagacagatagctgggcttccggaaggaggcgcttttttcgagcatttttataaatcaataaaaataggcatcttctaaatatttttgccgataagtttacgctaatcaactctagcactaatacatataaacaatagaatgatatgaaaggagacttaatagtatgattgattatcctattaatataaacaacgtttccgggaacagtgtaattaacgtaggcggcgcttttatgatcaggcctttaactttgtccaaatctgtgtttggctccggaggtttaaatacaggaattgtctttgaaaataactttgtaagcaaggctaaaatgattaatcatcaatttactgatcaaaacgtcaccaaaactttttaatctattcattacgggggcttgcgatgtctcactaactaaacacctggttttgccaaccgccatcagcactcggcggttttttattgaacatttttacccaataaaaaagctccctctatatgaggaagccttttgcctgccaattagccttctacgcgaacttctttcatgacatcgccgttagacatgtttttcgcgaattctaatccgcttgttactttaccgaatacagtgtgaacaccgttcaaatgaggctgtggctcatgaacgatgaaaaattggctgccgccagtgtcttttccggcatgtgccatagaaagtgcgcccgcctcatgtgtatgcgggtttccttctgtttcacatttgattgtgtatcccggaccgccagtaccagttccgtgcgggcagccgccttggctgacgaagccaggaatcactcggtggaatgtaagcccgtcataaaagccttcgttcgcaagcttttcaaagtttgcaacagttccaggtgcagcttcaggataaagttcaaattcgattttgttcccgtcttctaataaaaagtaacctgttttcaattgtatgcctactttctttattttaattttcaaaggagattatgtatgataggttatagcctgtctctccttgtcgcggctattataccacacctttcgggggaaaacgaatctcccgggctttactaaaaaataaaaatgaaacctgaatctctttatctccgtctaacctaacggaactgtatttttcatgattcaggtcctcacaaagcagcactatccagctgcttgtgaaattgaaggaggtcaaactgctttgaagaaaatttggattggaatgctggcagcggccgttttgctgctgacggttccgaaggtcagtctcgcggatgccgcagttggagatgtcattgtaacactgggtgctgatttgtcagaatccgacaaacaaaaagtgcttgatgaaatgaatgtccctgataatgccacaacggtaaccgtgaccaataaggaagaacatgaatatttaggaaaatatatatcgaacgcgcaaatcggatcgagagcgatttcttcatcgtcaatcaccattgccaaaaaaggctccggattgaatgttgagacccataatatcagcggcatcacagatgaaatgtacctgaatgcactgatgacagccggtgttaaagatgcgaaggtgtatgttacagcaccgtttgaagtatccgggactgcggctttaactggattgattaaggcgtatgaagtttcttcagacgaagcgatctcggaggatgttaaacaagtcgccaaccaagagcttgtcacgacatcagagcttggagacaaaatcggtaacgaaaatgcatcagccctgattgcaaaaatcaaagaagagtttgctaaaaacggggtgcctgataataaagctgacatcgaaaaacaagtggacgacgcagcttctgatttaaatgtcacgcttacagacagccaaaagaatcagcttgtctccctattcaataagatgaaaaatgctgacattgactggggacaggtcagtgaccagcttgataaagcgaaagataagattacgaaattcatagaatcagatgaaggcaaaaacttcatccagaaagtcattgatttcttcgtatctatctggaatgcgattgtatctatattcaaataggaaaagcgccgaaaaatcggcgctttcttttattgctttacacccgttttaaatggcagatcaagttttacaatatcttcgtatgtttctcgcttcacgactaaatgagcctcaccgttttcgacaaatacaacggcgggtctcggaatacggttataattgttggccatgctgtatccataagcgcctgtacaaaaaacggcaagaagatcgccttcttttacttccggcaggtcaatatcccaaatcagcatatctccgctttcacagcactttccggcaattgataccgttttgtcatgcgcttctccgatcctgttggctgccgcagcttcatatttagcttggtaaagcgcaggacgaatattgtcgttcatgcctccgtctacagccacatattggcggacacccggcacttctttttgagagccaatcgtataaagagttgtgcctgcgtctcctacgagagaacggcccggttcgatccaaatttccgggatgtcaaaaccgtaacgggaagcattttctttcacagcttcgataattttttcaacgtattcagtggcatgaagcggttcatcatcttccgtataacgaatgccgaaacctcctccaagattcagcaccttggatacaaatgaatatgaatctctccattcgtctagttttttgaagattttttccgctgctaacacaaaaccggccgtatcaaagatttgcgagccgatatggcaatggacacccagcagctgaatgtgttccgattgtaatacttgttcaatggcccgttcagtttgtccgttatgaagatcgaaaccaaactttgaatcttcctggcccgttgtaatgtagtcatgcgtatgcgcttctactccgggcgtgatccgaagaagaacatcgatggagtgacccgtttctttacataggtcttcaagaagcgcaatttcatagaaattatccaccacaatgcagccgatgcggtgctcaagcgccatgcgcagttcttccctgctcttattgtttccatgaaagtggatgcgttctgccggaaagcctgccgcaacagccgtatatagctctcctccggatacgacatctaaagaaagtccctcttcctcagcgagctgaatcattgcgactgatgagaatgctttgctcgcatatgccacctgtgctttcagccctgcagaaataaacgcctgtttaaagcttttagcacgctcacgtattaaagccacatcatatacgtaaagaggtgtaccatatttctccgctaaatagagagcatccacacctccgatttctaaatgaccatgttgattttgtctgcttgtgccgtgtaagaacaatgtcattccctctttctccgcttatggatgaaaggacagttttatggactgtcccttcataattaagacatacattatcatactcttcagtcagtttcaatgcgattatgaattggtaggctgtcttaagcgatttttggggtgaacgatactgggtcttacttttgcgccaggtttcgctgtgcggacaagaacctgccacagcgcctttccgttaaagggaatcagcggccataagtacggtgtctgaagggatttgatgcttgtcatggcaataattagcactgtaaatccgatgacgagcccttttatatgaaataaagcaacgagtatcatgaggacaagacggctcattttgtttgccaagcttaattcataactaggcgtcgtaaaggttccaatcgccgcaagtgagacgtacagaatcacctcaggagaaaaaaggccgacctcaatcgcaatctgcccgatcagaacagcggcaattaaacccattgctgtcgataaagccgtcggtgtgtgaatggcagccattctgagaaactcgattcctaagtcagctaaaaatatctgcaggatgatcgggatatgcgtatctttatttaaaccgataaatttcatgttgtccgggagcagatcaggctgaagcacaaagagaaaccagatcggaagaaataaagtagaagcaagaataccgaaaaatcttacccatcttaaaaaggtcccgactgaaggcgcctgcctatattcttcagcatgctgcacatggtgaaataaagtcgtcggggtaatgatcacactcggcgatgtgtccactataatgataacatggccttctagaacatgatttgcggccacatccggtctttctgtatagcgcacgagcggaaaaggattatagctttgattaacaatgaattcctcgacagttttgtctgccattgttaatccatcgacatcaatggatgcaatttctttttctacgatctcaaccagatccggatcagctatatcttctatataacaaatgcttaaatccgtctttgaccgctcaccaactttcgtcatcttgactcgaaggcgttcgtctctgatccgccttctgagaagggccgtattgacgacgatattttcaacaaatccgtctctggctcccctgactaccttttccgtatcaggttcttccgggtttctgcccggatagcttctgacgtcaattataaatgcgaaacctgcaccttcaacaatgacagcgacgagcccggacagcacttggtcggtggtttcatccaatgtttttactttttcgacctgggcgttcagcagcctgttttcgacgatgtcgaccagctcatcagggtcttctttccgattgttaatggcaacaagttctctcattaaatgaataatataggctgtatcgcataatccatttagatagtaaagctggatctctttatctaaaatcgtgagcttgcgaacacctacatcatagctcgtccccatcccgacacggtttttgaaatactcttcatttttagctggattccgataaacccgaattttctcttccttgtggtccggcatgatacccgctcctttctaaaataaactcgaccgctttcatggtgattggcgacccttttgagatatcgtcttttctgcccattttgccgatatccccgataccaacaataagcgggagatcaagtttatcaaggcaatagactgtatctccactcattctgtggtcatcaaattccctttccccgactttatcgacgccgtattcagttatttctccattgcggtcaatgcttacatcgaccctggtccattcagcctgatgtgtttttgacgcgaccgcaatcacaccgagcacttcaatagacggatgggttgcgacataggtcagagcggcttctcccggaccctctccttgaaggccggagtcgtcaaacatgacaaatacaggatcatacggtgctgaggcgatcagcttgacaagctcggcgccgctgcgggtggaaggattcccttttgattgtgaaatacatcgacctcccactttgcttgcggcgtattcaattgttttagcggcataaacatccccgtctgttaccagtatgaccttgcgttttgtcgtcatgtcggcattatcctttcggtttgaaaataacagctacgataaaggcgaaaagaatagcggctgagataccggccgaggtcagctcaaaaatccccatgccgattcctataaatccgtgtatatgcgcctgatgcatagcaccgtgcagaagactgtgaccgaagctgacgatcggaacggtggcgcctcctccggcaaattcaataaatttatcgtaaatgccgaaaccatctaatattgcaccgattacaacaaatgatgtcatgacatgagctggcgtcaatttaaaaatatccaagagcagctggccgacgatacaaatggccccgccgcatacaaaagccaaaaggtagtccatgttaagatgcacctcctgcacgctcaaatacaaccccgtgggcgatagtcgggatggtttctttttgctggatcatcgtcgggcttaacagcgccccggtcgccacgacaaatacacggtttaattttccttctctcagctgcttaaaaatatgagagtaggtgacaaccgctgaacaagcacagccactcccccggcaaagacctgctgatccggagtgtaaatcagaagcccgcaatcatcatgctttgtgccgactggatatccatcttcttttaagatgtcttttacgattggagaaccgacgcctgacaggtcacctgtcaggattagatcatagtcatccgctgtccggttgagatctttaaagtgctgcttaatcgtatcagctgcagccggagccatagccgatcccatatcaaaaggatctgtaatccctaaatcagaaacctttccgacagtcgcacttgtgatttggatatcacccggtgtctgactgatgacaactgcaccgcttccggttacagtggaggtagcagtgtccggtttttggcctccgtattctgtcggatagcgaaactgtctttccgcagttgcattgtgactgctggtggcagcaagtgcccttttggcaaacccgccatcaactaaggctgatgcgacagccactgtttccattgatgttgaacaggcgccaaacatacaaagaaatgggattttcaagtgtcttgccacatagttagccgtcacgttttggttcagcaagtcgcctgccagcaataggtcaatatcatcttttgtcagattgtttttttgaagcgcaacattaacagcgtcttccatcagctggcgttccgccatttcccagcttttttgattacaatgcatttcgtcataggttttatcaaataacgagccgagcggtccgtctttttcctttggtcctgctgccgttcccgctgagttgacaaatatgggatgttcaaatacccaggtttgctttcctgttaatttcattttcttctcctcctatgacatcagtttctcaaaagcaaaccgaatcattccaacgatgtatgcagctacaactccgaaaacaataacatttcctgccagtttaaacatatttgtcgctactccaagcactaatccttcacttttatattcaagagccgcgcttgccatactgttggcaaaacctgtgacaggtacggctgaacctgcgcctgcgaattgtccgattctgtcatagatgccgaaccctgtaagcagggcggaaattaatatcagcgttgcagctgttggattccccgcagttttttcattgaaatcaaaaaaatgaatataaaaattttgcagaccttgcccgattgcacaaatcagtccgcccactaaaaaggcttttacacagttccagacgtaaggcggcttaggctgatatgttttcacttttgatttgtaattttcttttatgtttgtcatcttgaaacctccttatgaatggtcaataaagtacagccaatgaaataaggatcccgcgattttcccaatcacgatggccattaacagaataatgattttacttctgagcccgattcgttttgccaaaatcggcaggacatttaaaacctctgtaagagcagccgctagcatcccgacgaacaaacctgccagaagcccgaccggcacagctatccattttgttagataaagatgattcatatgaagcgtctcccatcccccgcaaaccgcgccaagaataacagccgcttcataagcctgaacaaatctcattgttttggtgagctgcatcagccgcggaatgattcccattacggttaaaaaagcaacgaaacccgcccccaccgttatgcctccgccgagcccgacaaaaataatgaacaatacactaacgatcatgcagatcctttatggtttcttgattctcatgcatggccacatattgatcgagatcaagctgatagttaaacatctcaacctccagcgggctgggctcttcatttaggcgctttttaaatatgtggttaaaaaacacgatcatccccagtcccaaaccgatgctgtatgggatttgaagcaaatatggatagtcattcctctctccggttatgatttcatatagtgcgatatgaacatctctcatgcttacatcctcatgaaagttcatgatggcaagacacgatccaataaacagaagcagccagacaccgataaatagaaccgttgataaatttcgctttcgatattgaatttcaacaatggtttctgctccgcctacggtttgaacatcaagtgtcggatcttgtaaatgaatggctctgaggacttgtatgatatccagaattacgatatttttatctttttcgctcacctgataaagcggcatagccgaaagtttctttttcagctgaagctgcccttctatttgcgcggcatctccaacggtaataatatcccctggatgtgccagcacccggtggcgaagccggataaatattcgtcgttccatcattgatcaccatctttcggtggttatatatgtagtatgtggttcgattttgttctcattcatccgctcgaaaagaccataaattaccacgcttttgcacataaaaaagctagcctgcactgcagactagccatccgtatgatccatttgaaccttgatctgttttaatattttcttttcaagcctggaaacctgcacctgagagatcccgagccgctcagccacctcggactgtgtctggtctttataatatctgagatagacgattagtttttccctttcctccaaatcgctgattgcttctttcagcgcaattttgtcaaaccatttttcttctgagttgtcagcgatttgatcaagcagggtaatcggatctccgtcattttcataaacggtttcgtgaatcgaagatggagcccttaccgcctcttgggccagtacaacatcctcagcttcaatctccaaatggtcagcgatctcctgcaccgtcggcactctgcccagtgttttcgaaagctcatccttcgcgcgccggattttgtttccaagctcttttaatgatcgtgatacctttacagttccgtcatcacggataaatcgctggatttctccgataatcatcggcactgcatacgttgaaaaacgcacatcataggttaaatcaaatttgtcaacagattttaacagcccgatgcagccgatctggaagagatcgtcaggctcatatcctctgtttaaaaaccgctgtacgacagaccaaacaagacgcatgtttttttctatgaggaggtctcttgcctgctggtcgccattttggctttgtttgattaattcctttacttcatgatccttcagctgagcgtttttgccgtttttcttaacctccacatccataacaaatctccttaattacaaagcgctttgctttttgataagtgctttgttaagcgaatcgttgttcccatttcaggcgatgaatcgatactgacatcatccatgaaattttccataatggtaaagcccattccagagcgctcaagctcaggcttagtcgtaaatagaggctgacgggcttcttcaagatctgtaatgcctaagccttcatcacgaatagtcatatatacgacatgatcttccagcgtcactgaaatgtaaactttcccttcacagttctcttcatatccatggataattgcatttgtgactgcctctgacacgactgttttgatttcagtcagttcatccattgtcgggtccagctgagctataaatgaagcaactgtcacacgggcgaacgattcattctgactgagggcagaaaactcaaggtgcatttcatttttcatgatgccacccccagtgtcaggagcgcctgctgttcagattgttcaaatcggataattttaaacagacccgacatatcaaacaatcgcttcaccgcaggagagatagcgcaaacaaccatttctccgccaatttgcttaatttgcttgtatcttcctaaaataacgccaagccccgagctgtccataaaggaaaggtcctccaagttcagcacgatatggcgaatatcatccttctccaatgattgagtcactttttgcttcagggtttcagccgtatggtgatcgagttcgcctgttaatcgaatacaaagcacagattctttgacattcatgtcaattccaaggctcatgctcattcctccttgatatgatcggataatgagtgtttcgatttcgacggaatgaattccttcaccgtgacaaaactagtggtcattcggcataattacttaaattttgtccagtctcccatcgtccgctttaagaatgtgataaacccggctttcttcatatcttcttttgcagcaacaggactttcagcgagtacttctccatcctttttcagaacaagagtgccaagctcttggcctttttgaatcggagcactaatattgtccttcatcttgatttcttttttcacatcgttcatatcctcgccttttttcgtcaatattgaaatcggctcagatgtagtgagttcgatcaatttttgtttcccttttttgacctttacttttgctactgtttgatttcgtttatataaaggatgcgtttcatattgactaaaggcgaagtcaagcatttttgtcacttgcgcgtttctttctttaggcgtgctcgctccgaatacaaccgctatggcccgcatgtttccttttttagccgaagcagtcagacaatatttcgcttcgcctgtatagcctgtttttacgccgtctacaccaggataaaatttgataaggcgatttgtatttacaagccaaaactttttatctgtattttcacgcagataatcttcatacgtgccggtaaacttcgtaattgattcgtatttcaataattccttagccatgattgccatgtcataagcagagctgtagtgtccttcctcggtcagtcctgttgggtttttaaaggatgtatttttcaatcccagctcttttgcttttttgttcattttcttcacaaattcttcttcagagccggaaataaattcagccatggcgacggaagcgtcatttcccgaagcgattgcgatgcctttcagcatttctttgacagtcatttcttcgccgggctcaaggaatatctgtgagccgcccattgacgccgcatgctcgcttgtacggactttatcactcattttgattttgcctttatctaaagcttccataatcaaaagcatcgtcataattttcgtcatgcttgcaggcgccagtctctcattgctgttcttgttgtaaagcacttttcctgtgtcacgttctatcagcaccgcagacttcgcttcatgagcaagctccgatgtacgttttccgtcttgttttgcaaatgcagacggtgcaaatgtaagcagcattataccaatcaacaaagtggataaaagacgtttcatctcaaaagccctccatttcataatcctttttattttttccaagcgggatggttttatacgccactgatggaaaatgtttcgaattttgggcgtaaaaaaagacagctgtgtgatatcagacacagctgtcttttggtcctgcattgattcatttttattcgtactgagcgacgatcgctttaacaagctttaagaatccagcttttactttttcggtcacttccataacttcatcgtgacttaaaggctgatccagaattccggctgccgcgttagagatgcaggaaatgccaagaacccgcattcccgcatgattcgctacaatgacttccggaacagtagacatgccgactgcatcagagcccatcgttcttaagaaccggacttctgccggtgtttcgtaagaaggtcctgtcacagcagtgtacacgcctttttgaattgggatattaaggtctttcgcaatcttttcagccaggctggacagatctttgtcataggctgaagacatatctggaaatctggcgccgaaatctgcttcgtttggcccgattaacgggtttgttcccataaagttgatatgatcggtaataatcattaagtctcccgcacggaattcagtgttgacaccgcctgcggcatttgtcacgatcaacgcttccacaccgagcgctttcatcacgcgtacagggaatgtgactttctccattgagtagccttcataaaaatgaaagcggccctgcattgcaatgacggaaactccttcaagagtgccaagcacaagctgtccggcatgcccttcaacagtagataccgggaattcaggtatatcttcatatttcagcttgaccggattttcaatttcgtccgccaaaatgccaagacctgagcctaaaataaggccgatcttcggagattccggcaggttttgtttaataaaagcggctgcgcgttcaattctgtccttcaagaaacagtccccctattgtaataaagataaaaagcttttcccgtatttcggtttattcgtttggaaattatcagcgatcgttgcaccgatatcagcaaatgtatctgcaagcggcagcatttgcgctttcttatgttttttgctgtaagcgagaatcggcacatactcgcgtgtatggtcagtcccatgatgaatcggatcattgccgtggtcggctgtaataattaacagatcgtcttctctcattttttcaaacacttccggaagccgcgcatcaaattcttcaagcgcgcgtccgtagccttcagggtcacggcggtgtccgaataacgcgtcaaaatcaacaaggttcgcaaagctcagacccgtaaagtcttctcccagcgtatcgatcaccttgtccattccgtccatattagaaaccgttctgcgtgaagaagtaatgccttctccgtcgtaaatatcagagatttttccgattgaaatcacatctaagccgctgtctttcaattcattcatgacagtgcgatcaaacggcttcagcgcataatcatggcggtttggcgtccgtttgaattgacccggctctccgacgaacggccgtgcaataatgcggccaaccatatatttcggatcaagcgtcagttctctcgccgtttcgcaaatgcgatacagctcctcaagcggcacaacctcttcgtgagcggcaatttgcagaacagagtcagcagacgtgtaaacaattaaagcccctgtctccatgtgctcctggccaagctcatccaaaatcgctgtgccggaagccggcttgtttccaataattttgcggccagatctcttttccagctcttgaagcaattcatcaggaaagccttccgggaacactttaaacggtttatcaatgtataaacccataatctcccaatggccggtcatcgtatctttgccgtttgacgcttcttgcatttttccataataggcaagcggatgttctgttttttctacacctttgatatcttcgataagaccaaggccgagctttgccatattcggcatatgtaatccgttcatatgctcggcaatatgaccgagcgtatgagcgccttcgtcattaaagtcagcggcatccggcgcttcgccgattccgactgagtccatcacaattaaaaacacacgattatatttgtatgcaggcatcttgaaagcctcctttttttctatacgtctattgtatcgctaagaggtctgacaactcaagtataaaccgttttcattcccgttgacaatgtatttggaaataatgagaaacttcaatattttctgtcgctctaaacaaaaaagccgcagccacctgcggctatgctcgcggatgaaactgcttgtacacatccttcagccttgttttcgtcacatgcgtataaatttgcgtcgtggatatatccgcatgcccgagcatttcctgcaccgctcttaaatctgccccgttctcaagcagatgcgtcgcaaaggaatgcctgagcgtatgcggagtcagctctttcttaatgccggcttccaacgcgatttttttcaggttcttccaaaatccctggcggctgatctgtttgccgtgatgatttaaaaagagggcgtcagacacattgttctttaacagttttcccctggcttttgtcatatattcctcaatggcggaagcggcggcttcaccaattggcacaatccgttcttttcttcctttgccaaagcatcggataaaccccatagataaatgaacatctgccgttttcaactcaatcatttcactgactcgtatgcctgtcgcataaagcagctccagcattgctttatcccgatagccgaatgggctcgtcagcttaggcgtgtccaataaccgctcgacttcattgagtgcgagcaccttcggaagcgcccgttccgtcttttgtgtttcgatatgaacggaagggtccttatccgttactttttccctgagcagaaattgatgaaaagagcgaatggatgccaaatgccgcgccgatgtcttaccggatttccccgagtccttcaaatactttaagtattggataatatgtatgcgggtaacgtggttccaatccgtcacatgaagggtttctgttaagtagagagaatagcttttcaagtcacgttcataggatacgatcgtattttgagagagccctctctctaccatgacgtagtggatgaaatcctttatttgatctttcactcttgatctactccccgttttggtaaaaaaagatcaaccggtcgagccatccgcctttttcatcctgatccatttcaacaacttttacagcggagccttccggtttatcataccgatgatagttttcatactcttgattcacccatatcatagcataatagaacaaagcggtaaaaccggtaaacaggatgaaaactttcaatgcatcgacagctgttttcaggaatcttcccatgtcctaatcgatcctttcctatggttccagttatataaaccatatgccaaatcagaaaggttttatacatagaaacagcaaaaaaccctttccccatgagaaaaggttcgcgctcggcaccatctattcagtttcttttccattacagcggtggcaaatgccgtgaaacgtcaatctatgatctttaatcttaaatttccaatcacgttcaatgatttcttccacgtcttcaagcaaatcttcttcaatttcatcaacggctccgcactccatgcacaccaagtggtgatgaaagtgagctgcgccctctttccgaaggtcgtaacgggacacgccgtctccaaagttaattttatctacgacttttaattcagttaataattcaagcgtacggtatactgtagcgagaccgatctcaggagatttctcttttacgaggaggtatacatcttctgcgcttaaatggtcttcttcgttttcaagcagcactcttactgtcgcttcacgctgtggcgtaagtttatagctggatgagtgcagttgtttcttaattcgatcaatacggttttccatgtctttccctcctacgccgcattccatgactcattataacaaaatacgcgcagagttccaactataattattataaactgataaataaaacggttttcttttaataataattttaaaaaagtctagatgtaagcttttccattaaaacaggagataagtatgcttcaaacagagatgagatcagcgctaaaaacagaatgaccagcagcacaaaggcataccgcccgaaccattgaatcggcgcgtcatgcaggcttcgtttcacgaacagctgtctgattaactttaaagaaaacgcaattgcacatgtgcccataatgagataagccggaatcagcagcacattttgcggcaaaacggcgacaaatgataggaaaaacccgcttactcccatctgattgactaggaacccgacagtaaagccgacgacgatccctttcagaaagatcataatgaaaataatcggcatcccaatgacggaaattccgagtatccacatcaggcctaaatactttgcattatgaaagatactttgcccaaacatatcagctgaacttgcctgttttccatccgaaagctgtccaaaaaattgacttaagtagtagtataaatcttctttctggctgatggtcatactgttgacaataatcgcgccaaagatgacacccatgaaaaacagcactgacacaaatatataaagagagagatgatctttgacatgcctgagaaacatgtccttataagagatttttcgcataccgtttcctcccgcccgttctagtgatttgatttaatagattgtatgaaagaaacggaaaaacatgccctttttcaaaaagaaacgatagagatgaatgctaggcggctttttggggcacaaaaaaatccttatcatcaactgctgtatgatcataaggattcttatgcttccgtttattcaaaatctcttttttgctttttgtcattctttcatgtgtgctgaaagatggtgtgctgcctcttgataataagacgtcacgtccgccgtttctcaatcgatgcccccgcttctttttcgcttggctttttgccatgtgatcactcccttttttattttcatagtaatgataacaaaattgaacaatgataagaaaaaaacagcacctgctacgacaggtgctgtttagctacatttatttcactgctgtaagagctgcatgctcgacagctgctgctaccgcatgatggacttttgaatcaagcggctgagggacaacatcaccttgtttagtgcaagctgcgatggcctctgctgctgcgacaagcatatcatgattaatctccgtgctttttgcgttaagcgctcctctaaaaatccccggaaaaccgagtacattattaacagaacgcccgtcagctgcatatgcggcgccagcctgcagcgcggcctccggttcaatttccggcttcggattcgataaagccaaaatcacttgaccagaacgtacaaatgccggttttattaaacccggaacgcccgttgtagcaatgacaatatcacatgtttccatgagctcctcaatactggaaactgcctgtccgccgtattgttcgagacgattcattgctgactctgatttgtctgttccgtacacagcattcacaccataagccatgaacatccggcagatggccacgcctgctgcgccaaggccgatttgccccactttcgcttccttcaggtcaacccccgcactcctgcatgccgaaatggcagctgccagcgtcactacagctgtaccatgctggtcatcgtgcataacagggatgttcagctcctcttttaggcgatcctcgatttcaaaacaatgcggcgaaccgatatcctcaagaaggatgccgctaaagcccggagaaatatgttttactgttttgatgatttcttcaggatcactcgtatcaagcagtatcggaatgccgctaatacccgccagctgatcaaacaaagcagcctttccttccatgacaggcatgccagccacagagccgatattcccaaggcctaaaattgcggttccatccgttacaattgcaacagaattgctgatcgttgtataaatagaagctttttcaggttctttttcgatcagtcggcacacgtccgcaacacctggtgtgtagacacgtcccagctctgccagtgaacggatcggcattttgcttttcatttggatttttccgccttcatgtgcggacaggacttcatcagatacggtgtgaagcctgatcccttctccgagggcctgtacagccgcgatcacttcctgaagctgttcttcattctccacttgaacggtaatattccgcattgtgtaattgggtccgacttttaccgtctccacttcaccaatatccccgcccagaaggccgatggccgtagccacccttccaagatttccgggaaccgaaggcgtttcgatcatcagtgtccgaatcatgtgtttcgctatcattcagtgatcctcccctattagcctagtttttcggctttaactgtattgtttttcgtataccatataaattttcctgtataaccatagataattgcaagacctattgctacaaaactgagccacataaacggcagataagagaaggtagaaacacctaaaataccagccatgtaaatcccattatcagaccaaggaaccatccccgaagtcaatgttcccccgacctctgagttacgtgataacactcttctgtccagatgtaagcgatcatagctgtcttccataattttcggagtcaaaataagagatacatacatcgcacagccgaagatgtttgctaaaaacgctacgatcagtgtagacaatgtgacattgccggctgaagttaatttcttttcaaacgttgaaacaatgacttttaacacgccgagtttctcaagcagaccgccaaaaccaaggccaaagatgatgacgacgagagaatcaagcataccgacaattccaccgcggtttaacaagccgttcaaaaattcaacatccgttttaatagagaagccgttgtacgcagttgcaatcgcatgggcaatatccattccttggaaaacaacagcccagattgcaccgagtaaagcgccaattacgataaccggcatagatggctttttcatcgccaataagactatgacgagaactgccgggatcagcatccaaatatgaatgtcaaacgtgttttgcaaagatgattttaagaattcaactttatcaagatcaatatttttcccgccgtacataaatccaacaactgtaaagagtatagctgtaatgacataagcaggtattgataaataaagcattgctctcacgtgagccaatacatcgacttttgatagtgaagaagctagaactgtactgtcagacagcggagacagcttgtccccaaaataagcacctgaaagaatagctcccgctactagaggaagcggaatgcctaacccctctccaattgcgatcatggcaatgccggcagttccgactgttccccatgacgttcctgttgccacagacataatggaacaaataattaacgttgccagtaaaaagatacttgggtgaataaattccagtccgtaataaatcaaagtcggcacaacgcctccggcaatccatgttccgatgagcgccccaactgaaacgagaatcagtacggcttcaaggccatttgatatcccatgtacaatcgcattttgtaaatctttataagaataaccgagtctaatacctaaaagcattgcaataaaccatgaaacaaaaagcgccagctgtatcggcaagtcgagaaagactgtaaacgatagaacaagtgctaaaaatactcctagtacaataataatttcaaatagtgttggcaatcttacatccttcaaaagaagtcccccttcatgtaaaagctaaaacgctttcaatatatagtgcaacacgtatactatacttcctcatccctatgttgtaaacagcttattcatccgactattcggagatgaataagctgtattttatacaaattttatttttctaatagttctttccctgcgatacctggtttggtcatctcatatgggtttaaaataatatccaattcttcttctgtcagcacatcatgctgcaggcaaaggtcacggactgattggcctgtcataatcgcttccctggcaattctggcagccgcttcatatccaagatgcggattgacagctgtgatcacgcctgcgcttttttctacgtattgcttcaaccgcttttcgttggcttcaatgccttttaagcagttgtcagtgaacgaacggaagccgttgttcatgatgctgatggattgaagcaaattaaagacaagcacgggctccatgacgttcaactcaagctggccggcttctgaagcaaggcagattgtattgtcgtttccgataacctggaacgcaatttggttgatcagctccgccataactggattgactttccccggcataatagatgaacccggctgacgtgcaggcagagaaatttccgcaagtccggcgcgcggtcccgacgccattaagcgcaggtcgtttgcgatcttcgacatgttcatcatgcagacttttaatgaagctgatacctctgtataggcatctgtattttgtgttgcatcaacaagatggtcagcgccgacaagaggaagcccgctaatatcagcaaggtgctttactacctgtttgatatattcaggatcagcgttcagccctgtaccaacagcagttgcgcccatgttgacttcatacaggtgctggcgcgattgcttgattcgtttgatatcacgctcgagaacacggctgtaagcttcgaattcctggccaagacggatcggaaccgcatcttgaaggtgtgtccggcccattttaataacagagtcaaactcctgtgctttttgcttaaacacactatgcatatcttccattgttttcagcagtttttccaagagcttcaatgtggaaatatgaatagcagtcgggaacacatcgttcgtagactgtgacatgttcacatgtgtgtttggacttaaatggatataatctccctttttatggcccatgatttcaagcgcccggtttccgataacctcattcgcgttcatgttcatagaagttccggcaccgccctgaatcggatcgacgataaactgatcgtgccacttgccttccagaatctcgtcagcggcttgtacgatagcttggccaattccttcatacagccgtttcacgtccatgttggcaagagccgcagcttttttcacaatcgccagtgcgttaatcatttcctcatggattttgtatcctgtgatcgggaaattttcagaagcacggagcgtctgaattccgtaataaacatctgcctcaatttgtttttctccaaggaagtctttttccacgcgatattctttttggccgtttaacataatctttaaccttctttctctttgctggttatcgtttttacattttacaggacaacgtcatcagcaatcggtgtttccataattctcttgacgacaggaagatccgaagactgacctagtgcccacatcaattttggcacaattgcttctgtgttcatatttcttgatcggataattaagtcttggttgaccctgcggccaacttcgtaaatgctcatgtcttcgccttcttcaagacattgagtcgtaatgacgacgacaatgccgctttcgatcagttcattcacttttgacaaaatgtctctgccttcaaacggcacccctccgctgccataactctcaatgacaatccctttgtacatgcttttcagggcatcaaacatttcaggctttaagcctggatgcagcttcagcagacatacatctgtgcatagtgaagtgtcaactgtgaaggtgtcgttctcaggttccgttacttgtttgttgtattcgatcccgtcttcattgataaaagcgatatatgggtaattgatgctttcaaatgcgtcgtagcttttcgttcttaatttgatcgcacgcgttccctgaatgactctgccgtcaaacacaacataaacgccgcccacgccttcacaggcaaatcgaatggcatctgtaatattttttttggcatcggttttttggaacgtgatcggaatctgcgagccggtgatgacaatcggctttttggcatgctgcagcatatacgatagtgcggcagatgtataggccattgtatctgtaccgtgagtaataacaaacccgtcataggcatcataattttccttaacggcttctgctatttccacccagtattcaggctgcatattggtgctgtctatattcataagcgactgagtttccattgtgtaatcgttatcaagttttgatacgtaacttaataattcatcagccttgactccgggagccagcccattttccccttcaactgaagcaatcgttcccccagttgtcaacatcaataattttttcataccatgcacctcttcactgtatctaaagatgggttgcgagaaggtattcgcttttcgcatacttttaatgcaattatagacacggaaaataaaatacgcaagacattattattcaattcgcgtacacttcctaatacctatatgatataatcagctcaaggtgaaaaaggagcggaagttcatgaatctagatcgtttaactgaattgagaaaaaagaaaaattggtcgcttcaatatacagctgaccttctcggtatcgcaaaaagcacatatgccggctacgagtcaggctaccgacggccttcacttgaagcgcttgccatgctggctgacctctttgacacaacctgcgatgaacttttaggccgcgagaaacaaaagcagactgctcctcaggccatagaattggccacgtggagcagccttgactttaccatttctgttgatggccagccgctgagtgaagatgaaatcatccagctgattacctttatacgcacaaaaagaaaagtacaggaggaactgagttaatctttagctcacggtttaattttaccgtaggttcctcctcctccggctttcaattccagttttccggatctcgcttttacgataagcgccgcagttttcggcgggacaatgcgagccaaatcttcttctgcagcctcatgaagaacagccatttctgttccgaaggctttttttagtttgtccagcgttttcgggcctacacccggaacaaattgcagcgggatctgatgtacatatcgcggacgcgggacgcgaacttcaagctgatcactcaattcacgcaatctttcgctgactcccttggtaaatctggcatttccgcaattcgcgcacgctgtttccccgcttacagcaggctctccgcacgcttcgcaagcggtctgataatatttccccaataacgggtccaagccataatttgcgataattttcctgtcatcttgtccctttaatgcaagagcaaattcagtaaaatcagctgactgcacatatagttcattatattctctgccgattttccccaacgaatgcgcatcagaatttgttaaaaaaggatacggattcaattcagatacctgtgatgccatgtctgtatcacagcttaatccaagctccaccgcgtctatcatagatggatcaaaaacctcagttaagcttgatttaaccccttttccatataagcttttatgcggcgtaaagatatgggcggggataaacaagccgcccatatcctgcacttttttttgcaggtttaagcccgtttcataaatccgctgcgagcttaaatgaatatttttcagccgggctgacagccagtttgaaaactgtttcatatcagccagcgtcggcataaatacgagcacatggatcggtccgctacaggcttcatcataaatctccagctcgctccccaataaaagagtcgtgctgcgataacggattcctcccccgtcaagctcgcgatattttccagatgaaatgccttcctcaagctctagaatgacttccggagaatgacagtcgataatgccgaggagttcaattcctttatgttcactggcttcaaccaaaattctgtccagtgttaatgttttagcgcctgttattttgacagcccttcctgtaaaggtccggccgatatgaatgtgcaaatccgcgtaaatctttttcatttttgtgcttggagcgcttctttcagctgaagatactgaatcgcgtaggctgttttagcatcgtatacttcacgcgattcaaccagctttagcgcatcttcaagcgtcacctccatcacttcaacaaactcgtcctcatcaagctcccgtttttcttcaagcacagaaagctcctcagcaagaaaaacgtgaacgatttcatctgcaaatccgggtgatgtataaaacgcagttatttttgtcagtttttttgctgtataaccggtttcctcttcaagttcccgaagtgccgtatactccggctcctcacctttttcaagcttaccggccggaatttcaacgatcgtccgctcaagcggcttacggaattgtttgaccaggatgattttcccttcatctgtgacggctagtaccgctactgctccagggtgtttcacaatttcacgtttactggctttgccgtttggcagctctacatcctcgacataaagatcaatgactttacccgaaaagatctgttctttggcaattgttttttcttctaatgatttcatttcttcatctcccgttctgtctctatatgatgccccatacattttatcatactagagcaaaagggggcttcttcgtgaaagtgcaccgcatgccaaaaggtgttgtcttagtcggaaaagcatgggaaattcgggcgaagttaaaagagtatggacgcacatttcaatatgttaaagattggatctcaaagccataaaagttgaaactttagctcctttatattacggtcaatacaaagcctaaaaaaggagtgtgcacatgagaaagcgcaaattgggtacatctgatttagacattagtgaagtcggactcggctgtatgtctcttggaactgaaaaaaacaaagcattgtccattctggatgaagcgatcgagctcggcatcaactatttggacacagcggatttgtatgaccggggacgcaacgaagaaatggtcggtgatgcgatccaaaacagacgccaggatattattctggcaacaaaagcgggaaaccgttgggatgacggaagcgagggctggtattgggacccttcaaaagcttacataaaagaggcggtaaaaaagagccttacacgtctgaaaacagattatatcgacctttatcagcttcacggcggcacgatagaggacaacattgatgaaacgatcgaagcgtttgaggaattaaaacaagaaggtgtcatccgctactacggcatttcttccatccgcccgaatgtgattaaagaatatgtaaaaaaatcaaacatcgtcagcattatgatgcaattcagcctgtttgacagacgccctgaggaatggctcccgcttttagaggaacatcaaatcagcgtagtcgccagaggtcctgttgccaaagggctcttaactgaaaaaccgcttgatcaagcttcagacagtatgaaacaaaacgggtacttgtcctattcattcgaggaactgacaaatgcccgcaaggcaatggaggaagtggctcccgatctttccatgacagaaaagtcgctgcagtatctgctagcacagccggctgtcgcttcagtgattacaggcgccagtaagattgagcagttacgggaaaatattcaggcagcaaatgcacggcgtttaaccgaggaggaaatcaaagcgctccaatctcatacgaaacaagacatttacaaagctcatcgctcatagcagaaaaaccagcacccgtacaggtgctggtttatttatattgatgccaatccatttggctttcatttaggagttcttcaaagctcttatttttttcgatctcttttttctttctgatctgttctgctttttctctttcctgcctcttttcatcctcttccttcaattggctcttcatctccataagctttgctttgatatcggattgaaggccgtcttttagctggtgtttgtcagcaagatttttgttttttcattcagacttcccccatgttttgttttgaagacagtttatcacggagcatatacactgaacaagccgactctcttctgatcactttctcagcggagcagtgtttaggtataatgatttcaaacacgaattgcctatatatttagttgaaaggtgctgtgacttttgaagaaaatccttttggccattggcgctctcgtaacagctgtcatcgcaatcggaattgttttttcaaatatgattctattcatcaagaaaaaaacggatgaagacattatcaaaagagagacagacaacggacatgatgtgtttgaatcatttgagcaaatggagaaaaccgcttttgtgataccctccgcttacgggtacgacataaaaggataccatgtcgcaccgcatgacacaccaaataccatcatcatctgccacggggtgacgatgaatgtactgaattctcttaagtatatgcatttatttcttggtctcggctggaatgtgctcatttatgaccatcgccggcatggccaaagcggcggaaagacgaccagctacgggttttacgaaaaggatgatctcaataaggttgtcagctggctcaaaaacaaaacaaatcatcgcggattgatcggaattcatggtgagtcgatgggggctgtgaccgccctgctttatgctggtgcacactgcagcgatggcgctgatttttatattgccgattgtccgttcacatgttttgatgaacagcttgcctaccggctgagagcggaatacaggctcccgtcttggcccctgcttcctatcgccgacttctttttgaagctgaggggaggctatcgcgcacgtgaagtatctccgcttgctgtcattgataaaattgaaaagccggtcctctttattcacagtaaggatgatgactacattcctgtttcttcaaccgagcggctttatgaaaagaaacgcgggccgaaagcgctgtacattgccgagaacggtgaacacgccatgtcatataccaaaaatcgggatacgtaccgaaaaacagtgcaggagtttttagacaacatgaatgattcaacagaataaaaaagcgaaaggcctattcggctcttccgcttttttatgttacagaacgtcggtaatgccatccatattttctctgatccattcaatcgcaagatctatcgttgtaaactcctgcgtctcaaaggtcatttcatcctgcaatagccagacatctttcttgatggactctgctcctccgattgaccagtgaagcaaggtatagggatggttttgattcaggaaggatacccacgttttattttgtgctgtgttcttcattgccttcagcttttgttccacgtttcgcgtctcctactttactaatatgctcattctggggctgagcatttcagccgggcttttcagcgccaatgttttggctttttcattgtaatcgatcgtcatttgatcgtcaaaaaacactttttgtgacgattggatatacagcggaatgccgttcgtttccagctgctcgcactgtcccgttaattcttctgccagccagattgtggggacaccgcttaccgcgcagccgcatccttctgcatcgtaacgaagctgggctttttttcccgggttggcgtcaaacgcctgctgcagtgcctgttttgctgcatctgtcacatgtatgttcataaggtgaaacccccgttttcatcattttcgctattgtagcatacaacactgccattcgcattgtttctgccttttttccaccgcttcgcattttcttctgcagtcttgatccactcatctttcccttttatgtactgattgatgctgtcaggatgctgggccgccagccgttttttgagaacggcgtattctttcgctatgtttggatgagctctgagataatctctgaataacagatgcctttcaatagcagggtttccctgttcgtacatatggacatgatgagtgcgtttatttccgcccttttggaaataacgcctgcccgctatgccgttctcaccttttggtgtatagccgttagccttcatttgttcatcaaattggctcacggcttcaatgcttctgacttcaattaacatatcaatgattggcttcgctgccatgttcggtatcgatgtgcttccgatgtgatgaacagcgataatctccggcccgaacacaagtttcagcagttctttttcttcatcgaaacattctgcccatttttcgttgtagagaatgacctcaacttttcttttcggatacaaatgaaagaccgacagcaatagaccctgcgctgctttgacggtttctgccttttggaatccggcctgtgtatagagtgacacggccggggtattgttctcggctgtgactacttcgattttctcagcgtcttcattatgatcaatgacaaattgcagaagtgctcgtccaattccttttctgaaaccgtcaggatgcacaacaagcctgcaaatggtgagatgatgcatgtttttctcatatgaaatgacaccgatcagcttgccgtttttccgatatcccgcaaaccgttcatgggatgcttgaatatccttcaccttctcttgtaaagcgggaataccgtcaaaaccgataatctctgtttcctttatgtaggcggggatctgtacggctaaaatctcacgcgctatcgtgtcttccttatgctggagaaattcaatcattcgtgttcctcctgaaacagccgctgtctttcgacttttgcgacgcggactgcatacgactcgtaccaaaggctttttcctttttcttttgccgcttgatgttcagtgtgatgcttccaatggttaattgcgtccatactgtcccaataggaaactgtgatgccccttccatccgcttcacgtacgctttccacgcctaaaaatccaggctgatccgccgcaagtgataccatccgctccgctgtttctccatatcctgtgtcattttcgcttttgacagaagaaaaaatgactgcatagtaaggaggctcaggtgtttttgataaaaaatccatcatatttccccctcatatgtttttgacaaacagtaccctgtcttgacccggaccatcatagtttgcaaacactgagatgccatttaccgtcttggtgcccttttcaatatcaaaccccaattttgtgtgatatgcgattgataccttattcacaggtgaggtgacgcactttacccgggtgcagcctctttgttttactgtttcgataaatacatcatacaattgtttacctatttgcatttttctgaaatctggatgcacaccggaaaaatgaatgtacgccgtttcaggatccgattgcgattgaaatccgattaaaaatcccgtcatgctgttatgttcggatgtaataaagcttgtgtcctgaaaatgctcaaaaaatagtctcggcaatttttctttcagctgtctgccgccccaccattcattcagtacagacgttaccatttcataatctgaagacgtgattgttcgaatatccattacgatttgatctccctccgtctggcaaaacgaatgtcagctctttttctcacaatataaaaattatattttgcctggctggaattgtaaatgccttctttcctgtatcatacgtttccagactgccgagggaacaatgtttgatcattttacgcctatttctcccccaaacaggaggagagactttacagcacaatatcaagcacttgatcaagtttcagcttataaagctgatcctcgtctccttttatccatactgctttttcaaactcttcataccggcagattttcccggtgcagcagacaatctcaccgtcctgaaagcagctgacagtgatatcctgagcaaactccatcgcggtgcaaagcgtttgattcatctcttccagcttatcggggtcaaggatcggcttttgcagcttctgtttaagtcgctttctctccagcaggctttgcttatgttccggcagaaacatcctgctcccttcccacagcaggttgcccctttttaaatgatcgttcatttataatgcccccctattttagccgcacgttcaaatgcctggcctgccgctgtcagtgacgccgccctgatgattgctgtgtcgccgaatcgatttttaatgccgtccatcacatagcctaggctcattttctttgcataatcctgaaataaattgagctgccatatgtcatcagatgagagctgagacagattgacaccgagacggcggacaggtttcccgtcccaaaatgtaagaaacagccggcgtacagcctcatatacatcctgcgtagaattagtcggctctgccagcttcacttgccggttgaagcccgtcggccaatcaaaatcagcaccccggcagctcactgacaccgtctgccccatgaccccggcgtttcggcttcgcctgcacacttcttcactcagctcaagcaatacgaccttgatttctttgtcaaagtgttcgtagtctctcgggagagtcattccatggcctatcgccttttgcccgtccagagacgaagttgacacaggggaatagtcgattccgtttgccgtcatccacagcacgtggccgttaatgccccatttcttttttaaaagatcgagcggaaaagccgcgagcccgccgatcgtgctgatgcccattcgatttaaatgatgcttcatgcggctcccgacgccaaacatgctgcccaccgggagcggccacatttcggttttcatattttctttcgttaaggtaaaaataccgttcgtattctttttggcaaaattgtcacacgcaattttggccagcgctttgttagggccgattccgacccgtgcataaacgccgatctcccgcatgattctgccctgaatgcttttcgcgatctccatcggcgtcccaaacagcttctggctgcctgtaatgtccatgaactgttcatcgatagaataaggctccacaaggtctgtatactcctcgagaatggccgtaatttgcagtgatacatcaatataccgctgcatacgcggccggagcacaacagcctcaggacacttttcctgcgcctcccacagccgtgaagcattcaccacacccttttgtttcgccagcgggcaggcagccaatacgactccgccccttttttcagggtcacccgaaacaatgacgggcttatttttcaaatatggattttccgctttctctacagatgcataaaacgattgcatgtcaacgagaaaaatcactttttctttcatcatacacacctctaaaaagaacttatgttcgtttttcattatatgcgaaagtatgttcgttttatactggtaaatgattcttgtctgacagaaaatatgatccaagggtttgagagaagaaaaacatttagtagaataaaagcgaacataaggataggagagtcatgatggagaaatttgtcgaaaaaatgatggaacaggcattgcgtcaatacggcagaaacgttgctatagatccgttaagcccgtatgaaaaacaaagcctgaaagcggctctacaagagagacggaatgaagaaccagatgaggatttgcatgcgcatatagaagatatcatttatgactatgtcacaaaccaaggtctgttctcttaaacgcatgactgtcagttctttcagccgctgatgcggcttccctttgaaaacaccgcctgaaacaaataaacagtctcaggcttacagaaaaaagcaggattttctcacgctccatagattcatatggcctggcgtaaaattccccctcagaactcgcgcaaaacggaataagctgtccatgatcacgcgtatacactttttcgaagagatgtgctctcttgttctgtcatgcggtccatcggttttcagcttacatcttgatctcatagccggtttcactgccgatatgatctacgtcctggcggcttaaactaacacaccctcactgaccaatcgctttgcttttcatcggacatcccgtcatttttcttcttcaatttcaagatgtaaactccgtcagccacacgcatcctcaacgcatagtatattgccatccatacaatcaggcatactacatgtcaaaaacgaaatattttgaatgatctattggagaaggaaattttttcatatatgatagaggaagatcttacatacaggagagaatataattcatgaagaaatggaaagatatccacccgatcagctggacaattataatcggaaccattttcggcagaatggcaacatcgatgagcattccttttttagcgatttatttgacagccgtccaaggcgcatcagcttcctatgcagggctggtcatcgccgcgagctcatcagtcggcatcctcgcaagcttttacggcggatatatctcagataaattcggcagaaaaaacatgatgcttgtatcgattttcggatggatgctggtatttgcaggctttgcggcggcatctcatctctgggtgttttttgtagttaacgcattaaacggtctttgcaaatcactgtttgagcccgcttcaaaggccttgctgtctgatatgacagaagaaaaaacgagactgctagtttttaatttacgctatgcagctattaatatcggcgttgtcttcggacctgtgcttggcctatatttcggctcatcgcaatcgactacgccctttttggtgcctgcagtcatttacggactatacggaattgtgcttgccctccaatttaaaaaacatccatccttatcagcaccagcccagtcccgaaatatgagcgtgcgggaagcgtttatggtcacgcaaaaggattatctttttaccattgctttggtcggcattacgctatgcaccttcggctactcacaattcagttccacattccctcagtatatggcgcagaaccccttgatcggcaatggaacgaagctgtatgggctgatgctgacattaaacgcaatcgttgtgttggcgacgcaatttcccattgtccattttgcaaaacggttttcgccgctttgttctctgatgctcggtaatgtgatggttagcatcagcatggccattttcaccgtatcgcacggtgttccatcaattgtgatgattgtcatcacatttacaatcggcgaagtgcttttattctctatgatggatttgtatgtagaccagattgcaaaaacagggttaaaaggcacttatttcggggcaatcggtttttcacagctcggaaacgtcatcggcccttgggtcggggggatatgtatagacctgtttggcgctggccgtccgatttatattttttctgtcctgagcggcattaccctgctcggcctgccatttttagcgttcgcctatcggcagatgaaaacggagactacaaaacaccgttcccgtctggaaaagccgctttaaataaaaaaacgggagagaatcaatctctcccgcaacaatgaggtgatgaacatgaatataggcgatatgatgtttcagctgtttgtatttattatatttgccgctgttatctttgcggctgttacaggcttcaagtatgcgaaaaaccgaaaagcgcagctggatcgcattgagaaaaagctgaacagcctgtccgaagatcacgattaacagcttggggcaacgagctctaccttaatccgatccggatcctcacaatagactgcataatgcccgtctcctccggcaaaaggatgcctgtctcggtacaacacacgatagccttttgccgtcaatttttcggtcatctgatcgacttgatgcttggattcagcataaaatgcgagatggttcagaccgactcggcatctatggtattccggctctagaaatggctctttcgcctgcacaatcactaggtaaaaacgatctttcttccagctgatgcctgagctccatttttgatactctttatagccaagttcttttaagaaccagccccaaaaccgcctagacgcctccaaatcagagacatacagttcgatatgatgcacaatttcataccctccttaccagcacttcctcgaccttatgcccgtctcccttacgcaaaatgagatctgacctgaatttagtcggcaaaatattttcatataaattcggccggttgacactctcccaaatcgaggctgccatctcgtcagcctcctgatcggacaagtctttaaatttatgaaaatatgaatcaggattttgaaaagcagtttcccgaagcaggcgaaaacgctctaaataccaagtgaaaatccggctttcctccgcatccacataaatcgaaaaatcaaagaaatcggaaacaaaaatacgcgggttttcccggtcatcctccaaggtgggcgactgaagcacattaatgccttcaataatcacaatatccgcctgttctacaacctcgaacacaccttcctcgcggtcataggttagatgggaatacaccggggcctttacgctgtcctttcctgattttaagtcattcaaaaattcgagcagcgcctttacatcatagctttcaggaaacccttttctagacatcatatttttctttttcagctcggcagtaggaaataaaaaaccatctgtcgtgataaggctcacttttggacggtcaggcaaacgcgaaagcagcttctgcaagatccgcgccgtcgtgctttttccgactgcgacactgccggcaatgccgataataaacggaattttggctgaatgtggatgcttcaaaaaaacattgacatgcttattgcgttcagccgcagacttgacatgtaaatgaagcaagcgaacaagcggaatatagatcgtttccacttcttcaacagatagataatcattcaatccttccacagcttttgcctcttcttcagatacagcaatcgacaaatgccccccaaaaccagaccaagactcccgattgtgctgtgtatataaagtatgtaggttaagttctttatttttcactgtttacacctgactctctgtaggttaaaacccttacaaagattgtaacggaaaaccttttcactgtctgcttatttttcatttcgtttttttagcaaatcagcaccaattcggttatacgcagccatttcatcttttggaaccatgcttcctcccgttccccagacgacatgtacagcatgttccatcttatatttttgaccatagcgccttccctcttctgtcgaaaaaagctgaaccggcccgaacatgcccgcaagagcagagggctctaaatatttatcttcagatacagccagcatatgaagcaaagtataaagcgtattgtcctctaccgtataacagccgctcagaagcggttcaatcagcttgccgacaaatcctgacggcctccctacggcaagtccgtcagcagcagtctgattatccaggccgatatcctggacggagatcttttcgtgaagtcctgaataaagccctaacagcatacaaggtgaatgagttggttctgcgaaaaacacatgaacatcatctccgtataaaagcttcagcccaaatgctacaccgcccggtcctccgccgactccgcacggcagatacacaaacaagggcgtctcaagacttggctttatattcatacagtcaagctgcgtttttaatcggcttgcagcaacagcatatcctaagaacagctgtcgagaatgttcatcatcaataaaataacagaatggatcatgttccgcctgccgtctcccttcgttcaccgcttcgctgtaatctgtttcgtactccataacagtgactcccttttgacggaggagatcctttttccactgcttagcatcggcggacatatgcactgtcacgcgaaagccgagtgccgcgccgatgatgccgatgcttaaacctagatttcctgtcgaaccgacagcaatcgaatagcgggagaaaaacccggtaaaccgctcttcctgtaagatgcggtaatcatcggtttcctgaagcattccttcttgaagcgcgagattttcagcatgctttaacacttcataaatcccgcccctcgctttaatcgatcctgaaatcggaagctcatggtcgcactttaaaagccatcttccgggaaatggctgctgatatgccgcttccagctttcccttcatatgctgcacctcaaaaagcggagactcgatgattcctttagcgcctttcgtctcaggaaacacctcggcaatgtaaggtgcaaaccgctgcattcttttttccgcttccgctatctcggttgcccactcatctgcacggggtaatggcccctctttcttgcctgaatttgcccagaatacaggctctgcatcaatcagtttctgaataaacggatctttaagcagagcatgaaggacttctgaatgaactgacattcaacaatctctcccttccactatcaaaaactgccccgtgagaaacaagccactccaccacaggcagttctatcattattttttcatgagcgcgcgtcctgccagcttttctacaagagctggaaacagctgatacagcttagtgccggcattcattaaacgcggaagattgatctcccgctttttcgtaaaaattgcagctgtaatttgagctgccacgtcatcaggatcaagcatccagcggccgacatttttggcgtagtccccgcctttatcagcaatggaaaaaaagtccgtctgaatcgggcccgggttgactgttgtcacataaatgccggttcccgaaagctccatccgcaaagcgtttgagtaacctaacacggcatgtttggtcgcggaatacaggctagacttcggtgttgcgattttccccgcttgagaggcgatattgatgatatgtccctttttttgctcaagcatctgcggaagcaccgcttttgtacaggcgatcaggccgaagacattcacatcaaacatcgctttcatgtcatccaatgtagagtctaaaaccgtttcaaatataccgaagcctgcattgttaatcagtacatcaaccgagccgatctgatcgcggacccgggcgatatcctctaggcggccgacatccagaggaaaaatctcacactgtccgctccattcctcggttattttccttttgatttctatcaaacgatcctcgcgtctagccgacagaaggacatgggctccttcagccgcgcataagtatgcgattctttcaccaagccctcctgaagcgccggttatccaaatcctttttcccgctatatgtttcacccatttcacctcttcattgttttaaagtatgcggtatttccttcccaatatgacgtgatggcttcttcagcctccaacacatcaaggtgacctgccgtttctgacatcgttaaaaacaattccttttcatatacagcaggaaaaagctgctgacagacctgaaaagcggtcatcggcttttcatccagcatgcgacgcacatcctccgtcctgttcctctgcttgtcaaaacgcttctcaatcagcgcttgtacactggtgataggctcgccgtgaccaggaaatacgattgttggatcaagttgagacagccttcgcaatgaccgctgataatccactaaaggctttgacctgacgtcccccgctttcggcgcttccaaaatcggattagacgagctgtttgccagcagtagatcgccgccaagcatccttccgcttttttcatggaacagaacgatatgcgattcagcatgtccaggcatctccaacacggaccagccctcaagcccatctatgcccataccttctctgattgtttttgtcagagatctcgtacaggaaaatgcgtacgctgatcgaatcagcttttccgccttccccgtatcaaatggaacgcctaattcaggcagcagcttttgaaaaaaacgtttttgccaatccataaaggcttgatctcggctgatataaggttcgttgaatgtatgcccaatcacttcgatttcatctgaaaagacatcaagcaagcctgcatgatcagcatgatggtgagtcagtacaacctgctcgatatctgacattttcacatttacagcggcaagctgctcttgtagggctctggcagcctcttttgtattcggcccggcatcgataagtgtcagtgcatcaccttttacgaggtaaacgataacatcgccgacagcaaacggcgtcgggacgcggatcgcaattacatcttcagttgtcatcctttcgctccttgtcttcattcattattcatattttagctttttctcggtcttgtgtcattattgcagaatgagaacaaacctttttgaaaaagctattgacattagcttatccgccattgcataatgaacaacaaactaaaacgagaaccattggaacgctatgacgaggaatagtatacaaggcaatggcctaagagagcgatacccccggctgaaaggtgttgcggcccgcttgtttgtagaacctgccctcaagtcgcggttaggaaaacctaaacgtttcccgcgttacgggatttgagctgagcacaatttgtgctaatgagggtggtaccgcgaaccttttcgtcctttacgtgatgaaaaggttttttgttgttctgatagaaggaggatatcaatgaaaaagataggatttgtcggcgccgggtcaatggcagaagcaatgatcaacggcattttgcaaagcggcatcacaaaaccagaacatatctatattacaaatcgctcaaatgacgagcgtctgattgaattaaaggaaacgtacggcgtgcgtccatgcagagataaaaatgagtttttcactcacaccgatatcattatcctcgctttcaaaccgaaagacgcggcggaaagcatcgacagcatccggccgtatatcaaggaccagcttgtcatttcagtacttgcaggccttaccatcgaaaccattcagcattattttggcagaaagctcgcggtcattcgcgtcatgcctaatacatcagcggcaatcagaaaatcagcaaccggattttccgtaagcgctgaagcaagccagaatgatattagtgccgcaaaagctctattgaaaacaatcggtgatgcaacactggttgaggagcgagatcttgacgctgtcactgcaatcgcaggcagcggcccggcctatgtgtatcgttatattgaggcgatggaaaaagcggcacaaaaagtaggattagataaagaaacggcaaaagcactcattttgcagacaatggcaggggcaacagatatgctccttcaaagcggcaaacagccggaaaagctgcgtaaagaaatcaccagtcctgggggcactacagaggcaggtcttcgcgctttacaggactcccgctttgaagaagcaattattcactgtattgaagaaacagctaaacggagcgcagaaatcaaagaacagtttgccgttgccgccttagagagacattcttagatgtaagacaaaaacagaaggcactgtgccttctgttttttatttttcccgcagcagctggccggcagattctgattgctttaatagcgcggagatcgtaaatgaaagcaaatcgggaagcacttcaaaggaataaggcatatacaatctttccgtccatttatgcgggtctttaccagccggaccgacatttaaaaccggaacatataaagcctgatttttaccgcttggcaatgaatatcctctgttaaagagcggcatattgcttgtgtatgcatcaacctcctgtttttccagctgaagataactcaagtccgaaagtccggggaagtactgaacctcccgtaatgcaatgccgtatcgctcagccgcataatgctttatctgatctgctgtatttctgatcaattgatcatcctttgaagaaacagctggataaagcggcggactataaaacagaacgatgagcggcgcatcctccttacaaagcgaagcaagctcagaaacaattttcgtcgaaaaatccctgtctccaagctcccccctgttagcaaaggcataatttagagcccgctctgtttccgagatccccgcacgcttttttgcacgcgagaccagctcatcaaatgtcaaaacagtgacgtcccgctcaatcggctgaaatggctcaaattgttgaaaatcctgtgttttcttccgaacgttcgacatgatttcctccgccgcctgttctgctgttttaagcagcatctgatgcagctcactagctgagcgtttcattgacagcacattaaataatgtgacggctgtatgcggtgtctggactgaatatgcctctttcaagtccttttgcattaagtttaccggcggcggagtgacctcgccatcaaccttttcgcaataatcagcattcagttcaagcaaacggttaatctcagataccattaaatttgcgtttaggcctgaaaacggctctccaacatgtgtctcaatccccttgcagaaaaaacccgcaagcaccttgccaatgcttcctgtataaaaatattgctgctggtcgccgggaaatttttcaaacatcggttcggcattcaggcaagcggttaatgtgatatcatgctttttctccatctccttcaatgcaggaaccgcttcaatcatgcctcttgaattcacttcctcgtccggaaccgttatcaacagcagattgccctcaaaatgcccgttcattgccctctccagcatcgacagttgaatacaaagccccgctttcatatccatcgtccctcttccgaacagccagtctccgctttcggcatctcttctcacacgttccgggagcagctcttttttctctaaaaaggagctcaaaagctcagcaggcttgcaagccatatgtttaaattcgccgtaatcttctatgtcaacgacatcaaaatgactcagcagaagcactgtctttttgacattcttctttttgactagagccgtaagaaaagatctgccatcgtccatcggatgaagtgttacatcatcagggtgcttttgaaaatagggcttgtccttcaaaataaaataaagatactctgcaagcgctgcctcgccctttgaaccggtgatgctttcgtattgcacaagagaagttaaaagtgccagcaattcgtccttcgtctgccaattcattgattccgcccctcctatgaataaaaatgcttctatactgaaaaataaactgatttctcgtctattatacagaaatgtttgacaaaagcggttcatttgagcagtttatatgacgggaaagaaatgacttgatataatcaatctctaaaaaccttacgggaggcgaaagaaatggccagaaaattatttacacctattacaattaaagatatgacgttaaaaaaccgcattgtcatgtcgccaatgtgcatgtattcttctcatgaaaaggacggaaaattaacaccgttccacatggcacattacatatcgcgcgcaatcggccaggtcggactgattattgtagaggcgtcagcggttaaccctcaaggacgaatcactgaccaagacttaggcatttggagcgacgagcatattgaaggctttgcaaaactgactgagcaggtcaaagaacaaggttcaaaaatcggcattcagcttgcccatgccggacgtaaagctgagcttgaaggagatatcttcgctccatcggcgattgcgtttgacgaacaatcagcaacacctgtagaaatgtcagcagaaaaagtaaaagaaacagttcaggagttcaagcaagcggctgcccgcgcaaaagaagccggctttgatgtgattgaaattcatgcggcgcacggatatttaattcatgaatttttgtctccgctttccaaccatcgcacagatgaatacggcggctcacctgaaaaccgctatcgtttcttgagagagatcattgatgaagtcaaacaagtatgggacggtcctttatttgtccgtgtatctgcttctgactacactgacaaaggcttagacattgccgatcacatcggttttgcaaaatggatgaaggagcagggagttgacttaattgactgcagctcaggcgcccttgttcacgcagacattaacgtattccctggctatcaggtcagcttcgctgagaaaatccgtgaacaggcggacatggctactggtgccgtcggcatgattacagacggttcaatggctgaagaaattctgcaaaacggacgtgccgacctcatctttatcggcagagagcttttgcgggatccattctttgcaagaactgctgcgaaacagctcaatacagagattccggcccctgttcaatacgaaagaggctggtaatgccataagagatatcctgtagaggatatctctttttttatttttagagaaacgatcggctaaggttctccgtctccctagtagaaccaattagaggagatgactccaatgaaatcagcttggatggaaaagacatatacaattgacggatgtgcgtttcatacacagcaccggaaaggatcaagcggtgtaacgattgtctttgaggccggctatggtacttcttctgagacgtggaaaccattaatggcggacattgatgatgaatttggcattttcacatatgatcgggcaggcataggaaaaagcgggcaaagcagagctaaacgaacagctgatcaacaagtgaaagaattggagagtttgcttaaagcagctgatgtaaaacctccttatttggctgtttcacactcatacggagctgtcatcaccggtttatgggcctgcaaaaacaagtatgatattatcggcatggtccttcttgacccagctttaggcgattgcgctagctttacctttatacccgaagaaatgcacagatcacatacgagaaagatgatgcttgagggcacacatgcagagttttcaaaaagtctgcaggagctcaaaaagcggcaagtccacttaggaaacatgcctcttcttgtgttgtcatcaggagaacggactgagaaattcgctgctgaacaggagtggcaaaacttgcacagcagcatattgtctctatctaaccaaagcggctggattcaagctaaaaacagctcccacaacatccatcatgatgaacctcatatcgttcacttggctatttatgacgtatggtgcgcagcgtgccagcaggccgctcctctttaccaggcagtcaattaacgtaaaaaaagaccgggccgtaagggattcccggtcttttatattattttgtttcacggtgaagggtatatttctttaaacgcggtgaatattttttcagctccaaacggtctggattggtgcgtttattttttgttgtgatgtaatttcggtctcccgtttcagtgcaggctaaagtaacatttactctcataattaacatctccttataaagcgtaatgattacgttttattatacaacgtcatcacaaattgtcaaataagagctccgccttcagcctcgcgggacgtttacctctaagaaatcatatgccgccacgctattggggaaaacgtcaaccgcttctttttgaagctccaaagaagcatctccctgatatcttgcgctgatatgggttaaaatgagctgcttcgctcttgcttctttcgctgttacagccgcttgttccgttgtactgtgataataatcataagcaagtttacggtcttccttagcaaaggttgcttcatgaacaagcacatcacaatccctcgcaagctcttttagtttgtcacttactctcgtatcaccggagaacacaacagatcttccctttttaggaggctccagaaaatcattcccattgatgattcgtccgtcttcaagcgttaccgtttcgccttttttgattttctgatatacaggtccgggcgggatgttcatttcttttaatacgtcagccttcaaggaacccggtacgtctttttcctgcacacggtacccgaaggcttccactccatgaataacagataccgctgtgacaataaactgatcgtcctcaaacacgattccttcttcaatttcctggatcgcaagcggatatgtcaaatgggttttcgtgacggcaaggcttgtttcaataaacgccttgatccctttaggtccgtacactgtcagctcgtcctctccgccttgaaaggaacggctccccagaagccctggaagtccgtatacatgatcgccgtgcatgtgtgtaataaagattttctctattttacgaggtttaatcgttgtatgtaaaatttgatgctgtgtggcttccccgcagtcaaaaagccataccgaacgcctttcttcaagcaattttaatgccaccgacgttacatttctcgccttggcggggatgccggctcccgtccctaaaaaaagtaattccacgtttccttcctcctactagaaccagatacctacaagaatacaggatcaagctcaaaatgtgaatcttgcctctgaaaagaacaatcctttcgtgctagaaacattttttcagcattctgcttaaaaaagggcttaaatgtttgctttcgttgaattttagatttaaaatgaaggaaatatacggggtgtactaaaataaagcttcgaataaagtgaggtacttttagtgaaaacaaaccaacaaccaaaagcagtaattgtcatattcggtgcaactggagatttagcaaaacgaaaattgtatccgtctattcaccgtttatatcaaaacggacaaatcggagaagagtttgcagtggtaggagttggaagaagaccttggtctaatgaggatcttcgccaaactgttaaaacatccatttcctcatctgcagataagcatatagatgatttcacgtctcatttttactatcacccgtttgacgtgacaaaccctggttcttatcaagagctaaacgtattgcttaaccagctggaagatacatatcaaattcctaacaacagaatgttctacttggcaatggctcctgaattcttcggaacgattgcaaaaacattaaaatcagagggtgtaacagctacaaccggctggtcccgccttgtcatcgaaaaaccgttcggccatgatctgccaagcgcacaggcattgaataaagaaatccgcgaagcatttacggaagatcaaatttacagaatcgaccattatctaggcaaacaaatggttcagaacattgaagtgattcgatttgccaatgcgattttcgaaccgctttggacaaaccgctacatttcaaacattcaaatcacatctagcgaatcactaggcgttgaagaccgcgcaagatattacgaaaaatcaggcgcccttcgcgacatggtgcaaaaccatattatgcagatggttgcccttcttgcaatggagccgcctatcaaattgaacacagaagaaatccgcagcgaaaaagtgaaggtgctgagagcactgcgtcctattgcaaaagacgaagtggatgaatactttgtgcgcggacaatatcaagctggtgaaattgacggtgtaccggttcctgcttatacagatgaagataatgtcgctcctgactccaatacagaaacctttgttgccggcaagctcctgatcgacaacttcagatgggctggtgttccattctacatcagaaccggaaaacgaatgaaagaaaagtccacaaaaattgtcgttcaatttaaggacattccgatgaacctgtactacggtaatgaaaacaacatgaatccgaacttgcttgtcattcatattcagcctgacgaaggcattacgctttacttaaatgctaaaaagcttggcggagcagcacacgcacagccaatcaaactcgattattgcagcaattgcaatgacgagttgaacacccctgaagcatatgaaaaactcattcacgactgtcttcttggcgatgcaacaaactttgcacactgggatgaagttgccctttcttggagctttgtcgactctatttctgaaacatgggcagcaaacaaaaccttatctcctaactacgaatcaggctcaatgggaccgaaagtatctgatgatcttttggcgaaagacggcttacactggtggaatatataataagaagaaaaaagccgaaaatgtttacaagcattttcggcttttttgcagctgtcacagaggtatagcactctcattaataacaaaacccccgaagctctatagctttgggggtttctattgattacttcatccattcagtatggaagatgccttctttgtcagtacgctcatacgtatgagcgccaaagtagtcgcgctgtgcttggattaagtttgcaggcagtacggctgtgcggtagctgtcatagtaggctaatgcgcttgagaatgatggcaccggcacaccttgggcaactgcaagtgaaatcacttggcgaagcgctccttgatagctttctacaatattcttgaaatagctgtcaagaagcaggttgtcaagctcaggctcgcgatcgtaagcttctttgatcttctgaaggaatgccgcgcgaatgatgcaaccaccgcggaagatcatagcgatttcaccatatttcagatcccagttgtattcttcagaagcagctttcatttgggcaaatccttgcgcgtatgaacagattttactcatgaacaacgcttttctgaccgcttcaatcagctcttctttattttctgtaacaggcttcacttctggtcctgaaagaagtccgctcgctttcacacgctcttccttcatagctgagataaagcgtgcgaatacagattcagtaataatcggaagcggaacgcctaagtcaagtgcgctttggcttgtccattttcctgttcctttttgccctgctttatcaagaatcacatcaacaagcggcttgcctgtctcttcgtctttttttgtgaagatgtcagccgtaatctcaatcaggtagctatcaagctcacctttattccattcagcgaaaacttcatgaagctcatcagcagaaaggcccagcacctgtttcagaatgaaatatgattcagagatcagctgcatatctccgtattcaattccgttgtgcaccatttttacgtaatggccggcgccgtccggaccgatatatgtcgtacaaggttctccgtcaacttttgcagaaatggcttcaagaatcggttttacaagctcatgtgcttctttttgtccgccaggcatgatagaaggtcctttaagtgccccttcttctccgccggaaacgcctgttccgataaaatgaatgccgctttcagcgagttctttgttacggcgctgtgtatctttatagtatgtattaccgccgtcaattaaaatatcatccttctctagatgaggaagaagagattgaattgtcgcatctgttgcagttcccgctttaaccattaataagattttgcgcggtgtttccaaggattggacaaattcttcaatgctgtatgtgccaacaacattttttccttttgcctcctgtaaaaactcctcagttttactgcttgatctgttgtaaacagaaacagaaaatccccggctttcgatatttaaagccagatttttacccatgaccgcaagtccgataacgccgatttgttgttttgacatattctaacgtcccttctgcaaacgtttaatcattttaaaatttaaattaaaataaaatgatatttataataaagaaattaccatacattcaccctttttttcaagcgattcagcttttcttttcatcatgaaaaaaatctttattaaagcttgttccctttgttttgctctcctctttttttaacgttgccccttttctgatcagtttggtaccgtactttttattcagcttttccatcatctgctgaataggctcatccttcgcatcttcattaaagctgaacaaatcgagctgtttataggcctgctctttttctactaaatccgttccggtaatgccaagcagcctgacaggatttttattccagtgtttaaaaaagaggtgctccgcttctttcaaaatgtcatttttttgatcaatcgggtttctcagcgtggtgcttcttgtgatggttttccaatccgcatatctaatcataataaaaagcttcgaagccatgacttccttgcgctgtaaacgggcactcacagaagcagcaagctttctaaagacgcctaacagctcttcttcatcactggaatcatgggaaagtgtcgatgagttgccgacgcttttaaattcgtaaatgcgctccgggtcaaccggcgcatggtgaatgccatttgctttatttttaaggcgcggaccgtttatgccaagcaggcgtttcagggagtgttcatcagctgcagctagctctccgattgtatggatgccgagtcccttcagtttttccgctgtctttttgccgactccgtgcatctctccaacaggaagcggccacaggatatcaggcacttgcctctttcttaaaatcgtaattccaagcggttttttcatatcagacgccatcttagcgagaaatttattcggtgcgatccctatgcttgacgggagcagcagctctttttgcagcctgctttggatttcttttgccgtctctagcgcgcggctgctgtatggtgtatcggtcatgtccatatagccttcgtcgatggagacaggctccaccaggtcagtatattcacgaagaatggtaaacatcgctcgtgaagagtttctatagcggtcaaagttcggcggaagaacgatgagctcagggcaatggcgcttcgcttgccaaaccggcatcgttgttttgacgccgcgcgctcttgcttcgtagctgcatgttaccacaatgccctttcgctcctttacgtttccggcaactgcgaccggctttccccggagagccggatcatatgccatttcaaccgacgcataaaagctattcatatcaatatggaaaataattcggctctttcccggcataaacaaatctccttttcggtcattagacaacagcttgtacatatagtaaaatgaagctattgaatggatgtgatgacaatgtttgtggaatcgataaatgacgttttattcttagtcgattttttcacaattattcttcctgctctgacggcaatcgggattgcattcctcttacgagagtgccgtgcgggcgagcaatggaaatcaaaacgaacagatgaacatcagacggtctttcacattaaccgaacagactttcttattattatatatcatcgcattacaacttggatacgtaaagtcttccgcatgaattcgcctgtgaacgatgaggaagacgccggttctcttcttttataaaccgcatttataaaaaggaggagaacaaaattgttaaaaacatatcaaaaacttttggctatgggtatctttttaatcgtattatgctcgggcaatgctgcatttgcagcgactaatcaggtgggaggcctcagcaacgtaggttttttccacgattatttaatcgaaccgttttccgctctgcttaagggtgttgccgggctgtttcacggagaatacggactctctattatcctcgtaaccattattgtgcgtatggttgtactgcctttgtttgttaatcagttcaaaaaacaacgcgtgttccaagagaaaatggccgttattaaacctcaggttgacagcattcaggccaaattgaaaaaaacgaaggaccctgaaaaacaaaaagagctgcaaatggaaatgatgaagctgtatcaagagaacaacatcaatccgcttgctatgggatgcctcccaatgctgattcagtttcctattgtgattgggttttattacgcgattcgctctacacctgaaattgcgtcacactcgtttttatggttcagtttaggacaatctgacattctcgtgtctcttagcgcgggagcaatgtactttatccaggcctatgtcgctcaaaaactgagcgcgaaatattccgctgtcccgcaaaaccctgcggcacagcaatccgcaaaattgatggtgttcatcttccctgtgatgatgacgattttctcgcttaatgttccggcagcccttccgctgtactggtttacaagcggactgtttttgacagtgcaaaacatcgtccttcagatgacgcatcataaaagtaaaaaaacagccgctcttactgagtcggtgaaataaaaaagcaaccccgcgcgaaaagccggggttgttttttgttacttgcaaagcataccgcgccaaacagtcttgtttatcatagctgaagcagaaatggccatccaaaaaatagccgtatcgtttaaaaagaaggaaatagggaatacctttactcacctccaaacgaaaggagcatatacgttgacggaacactttcagcaaaaaaacatttctgtacctgatggaatctggatcatgagacaaacctggaatgatgtcttatttgctcactggcctgttgatgtttctatccttcgcgctttggtaccgtccgttttagaattagatacatataacgggcaagcttggatcagcatgcttccctttatgctcacgaacctaagggcgcgttatcttcctgccattcccggtgcgcgtgcatttcctgagcttaacctccgcacctatgtcacgtataaaggcaagcccggcatttatttttttagcttagatgccgatcatcgtctggcggtccttggcgctcgcacattctttcatctgccttatttttacgcggatatgaagtccgaaaaaaacggtgatgccattgactatgtcagcaagcggaaaaatgacaaagaagcagcattccacgccgcataccggcccatttcagcgccttttacagcagaaaaggattcgctcgattactggctgacagaacggtatagactctatactaccaatcaaaacaaactctattacgaagacatccatcatcatccatggctgctgcaaaacgccgaagcggaaatttcagtcaatacggtgactgatgctcacggcattacattgccagagtcagaccccttgcttcattacgctaaaaaacaggatgtgttattttggccgcttaggaaatggagctaaaaaaacccgatgcgggaaatcgcactcgggttttctttttttattttgccgcctcttcaataatggcaacaaccatttctgccgttttaacgagctcttcgatcggcattttttcattttttgtatggatttgctcataaccgacagcaagattgaccgtcgggatgccatgaccagcgattacgttcgcgtcgcttccgccgccgctcgtttgcagctcgcttggacgtccgattttagcagccgcttttttcgcgatttcaacaacttggtcgccgtcttgatatttaaagcccggatacataacctcaatttcgacttctgcgcgtccgcccatatcagcagctgcctcttcaaaagcagctttcattttttgaacctgagcttccattttctcaggaactaaagagcgcgcttcagcaagaatatgaacttcgtcgcacacaatgtttgtttgtgtgccgccttcaaaccggccgatattagctgttgtttcttcatcgatacggcccaatggcatttttgaaatggctttgctagcgattgtaatcgctgaaatgcctttttcaggttcaaccccggcgtgagcggttttcccgaaaattgccgctcttaccttcgcctgtgtcggcgcggccacaatgatatttccgacttttccgtctgaatcaagagcatagccgtaggatgcagtgatcatagaacggtcaagcgccttcgctccgatcagacccgattcttcccctactgtgatgatgaattcaatcgtgccgcgttcaatgttttcttctttcagcaccttaatcgcctcaaacattgcagccaatcccgctttatcatcagcgcctaaaatcgtcgtgccgtcagttttgacgtaaccgttctctacaactggttttacgccgtttccgggtacaactgtgtccatatgagatgtaaaatagatcgtatctgtttgttttgtcccttttagcgtgcaaatcaggttaccggctccgtggcccgtgatatccattgtatcgtcttctttaacgtccacacctaaatcagaaaattttcgtttcagcactttgcagatttcagcttcgtgctttgtttctgagtcaatttggacaagctctaaaaattcttccagcaggcgtttttcattcaccatttgtaagtccctccatattaaagcggtatgttaccgtgcttttttttcggtctctcttctgtcttatgtgcaagcatatgaaaagcttgaatcagttttccccttgattcttccggcaaaatgatgtcatcgaccattccacaagctgccgctttgtatgggccggcgttttgctttttgtattcagctgttttttcgcgtttcgtcttttgcgggtcagctgaagctttgatttccttttcatacaaaatcgatgccgcaccttctggacccatcactgcgatttcagcattcggccatgcaaacacaaggtccgctccgatcgctttgctgttcatggccacataggcgcctccgtacgcttttctaatgatgagtgtgacttttgggacagtcgcttcagcataagcaaacaataattttgctccatgcctgatgattccattgtgctcttgctgaatacccggcagaaaccccgggacatcttcgacagtcaatagcgggatatcaaatgcgtcacaaaaacggatgaaccttgctgctttatcagcagcgtcaatcgtcaggcttcccgccagatgcttcggctggctcgccacgatgccgattgctttttcacccagccttgcaaacccaatgacaatgttcttcgcaaaaaatggctgaatctcaaaaaaagattgcgggtcagccagctccctaatcaccttccgaacatcataagcctttgtcgtatcagcagggacaagacggtttaataacggtctggacgcctctttctctggcttcggctctgttgtccggccattcagcggcaaataagacagcagttttctcacccctgtcagaacctccttctccgtatgcccggaaaagtgggcgtttccgctgacggcattatgtatccccgctccgcctaagctctccgcatcaacctgttcccctgtcactttttcaatcaccttcgggccggtaataaacatccggccggtctgttcagccataaatataaaatctgtgagtgccggagaatatacagcgcctccagcgcacggccctaaaataaccgatatttgcggaatgactccggaatataagacgtttcggtaaaatatgtgaccgtatccatctaatgataacacaccctcttgaattctcgcaccacctgagtcattcagcccgataatcggcgccttattttttgctgccagatccatcaaagcgcagattttcctggcatgggtttcgccaagcgcccctccgtacactgtgaagtcttgcgcaaatacataaactgagcggccgtcaattgtgccataccctgtcacgaccccatcccctaacatgcgctgttctcttgttaacacttgactttccatgaaggggtgtaattcgataaagctgtcctgatctagaagaaatatgatcctttcccgagcagtgtgcttgcccttttgccgctgctgagccagcttttcccgtcctccgccttcttctgcctgcttgcgtttcgtgtataaatgatccatgtgttcattcatgctcattgtgttggtctcctttcggttcacaaagctctacaagaacaccgtttgtttcccgaggggaaataaacgcgatctttttcccgttcgctccctgtcttggaaacctgtcaatcaattgaacatgctggtcagacaatgcttgaagctgttcagataggccgttgcacaaaaacgcaatatgatgcagtccctgccctttcttctccaaaaataaatggacggggctgtcagctgtcaacggctctatcagctcaagtttgacgctaccagcttgaaaaaaagcaacattcaccttttgctcttcaaccgtttcttgatgaagaaatgcaagccccaatacattttcataaaagcttcttgcatcttttatcgaaaaaacggctatcccgatatggtcaagcctgttcattttcatccctgctttcgctaatagatatcgcttgtccgcccattcaaaacacgctaaaatatagacagattgtttaaggagtgaaaatcatgtctcaaaaactgatgaaaagcgttttgatcgtgattttgggagtttttattctttcaactgtactctcaggaatcgtcatgtttctataacgataaaaaagcaggcgccttattcaatgggaatatcctgcttttttatcagagctttatgctcgatggcaatctcctcaaaagagcggttgtcgtccgtgatcagcactctcgttcctactggtatcgtttgaaacaaatgaacaacctcatcgttatgcatacgtatacagccgttagacacaaattttcctactgattcctctcggtttgtcccatgaattccataaatccgcccgtccgttcctttcgcgtcaaatccgatccatctggccccaagcgggttatcaggagatcccccttcaatatttttctttctgtagtaaggattttccgcttttaccgttaccgaaaactctccttcaggcgtcaaatcatctgtttttccagtcgccacactatacacgccttctactttgttgtcgagaataacagcaagttcatttgttcgcttgttgacaataacatacggatcacctggcagcggattttcgccgagcggccaaatcggtgaaatcatcattaaaatcgaacataagaaaaaacgcataagctcctcctttttcattaggttgaccaatgaaggaagagctcatgcgaatcatccgagtgatttttgcgcttttattcctttaaaataacttttaatcactaaatattgttccatttcgccgagaagatggaagagagcggccctcgcttcaaattcctctctagtcgcaggaagcggcatctcctcaaattcttttctcatgtcagcaagtcttttcagaaatttgtacgctgtattcccagggtgtatcgcctcccgcaaatcatgaataaattcagcgatcatttttccctgatctaccgtgatggagatcgatgtcactttagggagaaggcgttcgataatttcaaattgcttttctctcattttaaaataatgataatgcagattttcgtaacgcaaaatgtggttttgcacatctcgatatgccaggtttttagcctccgtaatgagctggtgcgtttccggaatttcttttcctgaccaatcttgctcaccagttaacaaataccgttcgatttctgcaaaaatgacagcaaagttatcctctatctttttgcggtaggcaatcagtttccggtcaagactaggcatatacaagttcatcaatagagcgacgccgatgccaaccgtaatcagctgaacttcattccagatgaaagcaagcgtaatgccgccggacatgtataaatgaaggataataacggaactggtgacgataccctcgttaatttttaacagaaccgttatcggaatgaatatcaaaagaagcgctccgatcacaaacgggtggtagccaataagctcaaaaaagagataagaaaaaacaattgccagacagcatgccgcaaagcgggcccatgaggcctgaagcgaccgtttttgtgtgatttgtatgcacaaaatggtgatgattcctgctgatgcgaagttttgcaaatgcaataactggcttatataaatagccaaagctgttccaagcgcggtctttattgtgcggtaaccaattttaaacatgtcggactccatttctatttgtttcttcaataaaaaagaagaggcggccagccttcttcttttttatattctataatattttctctaaaaagtcctgcgctcttttggattttggcgacataaaaaattccttcggattgccgtcttcgacaatcattccttggtccataaacagcacacggtctgccacttcttttgcgaagcccatttcatgtgtgacaatcaccatggtcatgccggtttcgaccagctctttcatcacctgtagcacttctttgaccatctctggatcaagggcggaggtcggctcgtcaaacagcatgatgtccggattcatcgcaagagccctggcaatcgcgacacgctgtttttgtccgccagacaaacggtttggatagtcatttcgcttttcaaacaaaccgactttgcggagcaggtcctcagctttctcctgtgcagcctgttttgattctttttttacattgacaggcgcgtacatgatgttttcgagaaccgttttgtgcggaaagagatgaaaatgctgaaaaaccatcccgatgttttcccggacctttaatgtgttggttttcggcttcgtaatctctgtgtcttttattgtaatggttccgccgttaggcttttccaacaggtttaaacagcgtaagaacgttgatttgcctgagcctgaaggaccgatcacggcaacaacctcaccctcagcgattgttgttgaaatgttttttaatacttcgtgtttcccaaatgattttgacagcttttcaaccttaatcattggatttcagcttcctttctacagccttgccgataaacgttaaaatcaggacaagcacataataaatcaatcccgcgataatgagcggctcaaggtaattgtaagtggcggcgccagcttgatatgcgcgtctcatgacatcaccaagcccgatgacggtgacgatcgccgattcttttgttaacgtaattaattcattcacaattgcaggtgatatatttttgaaggcctgcggcagcagcagatccttcatcatttttccatacgggacaccgagtgcaacagcagcttctttttgccctttatcaatggcattgattccggctctgataatttccgatacataagcggcggaattcaaagacaatgcgacaaccgcagcccaaaactggtcaatttgaaatccgagcagctgaggaaggccaaaatagacaatcataagctgcagcactaaaggcgtgcctcggaacactgatgtataaaaatcagcgatccagataaacgggcggaatgtgctgatcttgcataagcttagcacaataccgagtataagtccgataatagcagatacaacaacaatttttaatgtaattgccaagccttctaatataaaaggaatttgggggatcgttgctgaaaaatccaaattcatagcctttgtctccttttcttacaggaaaaaagtttcctattcaataaaaaggctcaacgaaaaagttgagccgcttttttttacttctcgccagtgaaccattttttcttcaatttctcaagctctccgttatcttccatttccttgagcgctttattgaatttgtctgtcagttcactgtcctttctgaaagcaattgctgaaccggcttcttccgctttcgcctcaggaatcacaaagccttgcaggtcatcatttgatttgaaatacccttctgcaacaatgtcttcaataatcgcggcatcgaaacggtcagatttgatttcctgcaccaaatcagaaattctgttgcggtcttctgttttaaaaccatattccggagaaagctctttccccttctcttcctgaatagagccaagctgaacgccaactgtttttcctttcaggtctttcaaagattgaatgccgctgtcttttttgctgacaatcatatggttcgctgtgtaatacacatcggaaaaatcaacttgttttttacgctcaggcgttggtgtcattcctgacagaacgagatccacctgttttgatttaagcgctgtaattaagctgttgaagtccatatcctgcacttcaatttcatagcctgccttctttgccagagcttttgccagctctacatcaaagccgacaatattatctccttctttatattcaaacggtttgtaatccgccgaagtacccataattaattttttctttccgctttctgaacctgaattgcttgagccgcacgcagttaatgcaaaggtgatgcaagcagctacaagtaataagagccattttttcatgatccatttcccccgtattcattacttttggtgtatttgaatatttattcgttaatttgtattttaaacagtttctcatttttatgcaatactatttttaaaaattatctttaagcttatctttccagtgatctcttctgatattactagataaaaattaaatcgctgtacaatccgattgaataatcccttaatatttattcatatatccttagaaatttatgcacaaaaaaacccgggctgctttgagcatccgggttgttcgtcttatacttcttcacaatattcttcaaaggcttcctgcagctttgccactacggccatcggctcatggccttcaatttcatgacgctctaccattttcatgatctttccgtctttcaaaatcgcaaaggacggagaagatggcggataaccttcaaaatagtcacgcgcacgcgctgtcgcttctttatcctgtccggcaaaaacggtgacgagctgatcaggtcttttatcatagtgaacggaatggtaggctgccggtcttgcaattcctccggcgcatccgcaaacagagtttaccatgacgagcgtcgttccttttttcgtaagtgcctcatccacctcttcggctgttttaagctcggtgtatccggcagctgttatttcttgtctcgcttggcggacaatatcattcataaataaattaaagtccatgttcaatgaagacctctcctttttcatcatctgttcttatgatagcaaggaaacgtccatatcggcaaatgactttgcttcgccgtgcactttttttgctcttcgtttactgcttacagaaaaaggggattatataactagaagtaaaataaaggagcagttgtatatgagccacaggaaagcgttactgattcataacggaaatgccggcaacaaaaatatagaaaaagcacttggtgctgtggtgccggttttatctcaccatttagatgaggtaattattaaacagacaaagaaaaaggatgatgcgtatcatttttgccgatccattgatgattctgtcgacaccgtcttcattctcggcggcgacggcacgatccatcaatgcataaatgctatcagcgctctagaaagaaaacccgcggtcggaattttgcccggcggcacgtgcaacgacttttcaagagtgcttggcatccctcaaaatcttgcaaaggctgcggaagcacttatgtcaggaaaaaaaaccagcgtagacgtatgtcagatgaatgaccgttattttttgaatttctgggggatcggcttaattgcagaaacgtcgaatcaaatcaacgaaacggaaaaagcattattgggaaaaatcagctattttacaagtgccttgcgaaccgtctcatccgctgcatcgtttccgatgacattaaaaattgatggagaagaaattaaagaagaagccgttatgctgcttgtgatgaatggccaatatattggaacgaatcgaattcctctccccgatgccagtattgaagatggcttacttgatgttctcatatgccgcaataccaacctcaccgcgttgcgggagctgatgagcatggaacagggttcaattgatcgttttaccggagagttgtcctatgtccaggcttcccgtatcgagattgaaacagacactgccaaaaaggcggatatggatggagaagtttatacacatacacccgcagtcattcaggtcctgccgcagcatatcgacatgcttgttcccgcaaatgaataactgtcatagggctttagaaagattttgcaaatccgttgactctcccctaggaggaggtcttacagtataagggatacacacttgaaaaaggggaagtcatatggagaagaaaaatattaccttaactatattattaaccaatttatttattgcttttttggggatcgggcttgtgattccagtaacgccgaccattatgaatgaattgcatttatcggggaccgcggtcggctatatggttgcctgcttcgctattacacagctcattgtctcaccaatagccggacgatgggttgatcgcttcgggcgcaagatcatgatcataatcggcctgttgttctttagtgtgtcggagtttttgttcggcattggaaaaacagttgagatgttatttatctcccgtatgctgggcggtatcagcgcagccttcattatgcccggggtcacggcttttattgcagatatcacgaccattaaaacacggccaaaagcgctcggttatatgtcagccgctatttcaacaggatttattatcggccccggcatcgggggatttttagcagaagtccattcccggctgccttttttctttgcggcagcttttgcactgttagcagccattttatcaatcctcacgctgcgcgagccggaacgaaaccctgaaaatcaggaaataaaaggacagaagacaggctttaaacgaatttttgcccccatgtatttcatagcttttctcattatcttaatttcgtcttttggtttagcatcatttgaatctttatttgcattattcgtggatcataaattcggatttacggccagcgacattgccattatgattacaggaggagcgattgttggcgccattacgcaagtcgtcttattcgaccgcttcacaagatggtttggcgaaatccatttaattcggtacagcttaattctctctacgagtctggtattcttgctgacaacagtacattcatatgttgcgattctgttggtgacagtcaccgtatttgtcggatttgatctcatgcggcctgcggtaacgacttacctgtcaaagattgcgggaaatgaacaggggtttgccggcggtatgaattcaatgtttacaagtatcggcaatgtattcgggcctattatcggcggaatgctgttcgatattgatgtaaactatcccttctactttgcaacggtcaccttagccatagggattgcactgaccattgcttggaaagcgcctgcacatcttaaagccagcacgtgataagaagcgcattctttgtgtactgcaaagatgcgcttcttctttatactgatgatagaaggagtgatggcatgaaggaatcgtattactcaattggggaagtatcaaaactggcaaacgtgtcgataaaagcgctccgttattacgataaaattgatttatttaaacccgcctacgtcgacccggataccagctaccgctattatacagattctcagctcattcatctggatttgatcaaatcattgaaatatatcggcacacctttagaagagatgaaaaaagcacaggacttagagatggaagaactgtttgctttttataccgagcaggagaggcaaatcagggagaaattagactttttatcagcactggagcagaccatttcattggtgaaaaagcggatgaaacggcagatggaatatcccgcgctcggtgaggtgtttgttttagatgaagaagaaatacggatcattcagacagaggcagaaggaatcgggcctgaaaacgtgctcaacgcctcctacagcaaattaaaaaaatttatcgagtcagcagatggatttacgaacaatagctacggcgctactttctcttttcagccctacaccagcattgatgaaatgacttaccgtcatattttcacgcctgtattgacgaataaacagatttcatcaattacgtcggatatggaaatcacaacaatccctaaagggaggtatgcgtgtatcgcgtataatttttcgcctgaacattattttctcaacttacagaagcttatcaaatatatcgcggaccgccaattaacagttgtcagtgatgtatacgagttaatcataccgattcattactccccgaaaaaacaagaagaatatcgagtcgaaatgaaaatacggatcgctgaataataaagcatagaaaaagagcattttttgaaacaaaacttcaaaaaatgctctttttgcttatttagtaaacagatgtcttctcgtcaatcgattctaaaatttgtttcactcgtccgaggaatcgtccgcacacgagaccgtcaagcactctgtgatctaatgacaggcacagattaaccatgtctctgacagcaatcatgccattgtccatgacaaccgggcgtttgacgatggattctacttgaagaatcgcagcctgagggtagttgataatgcccattgactgaacagagccgaacgaacctgtgttgttgacggtaaacgtgcctccctgcatgtcatctgcagtgagttttccgtctcttacttttttagctaggccggtaatgtctttcgcaatgcctttaattgttttttcatcagcgtttttaatcaccggaacaaataaagaatcctctgtggcaactgcaattgaaatattgatatcctttttctgaataattttgtcccccgcccacatgctattcatttgcgggaattcttttaacgcctgagcgaccgcttttacaaaaaaggcgaagaacgttaaattaaagccttctgtcttcttaaaggaatcttttatactgttgcgatatgcaaccatatttgtgacgtcgacttccatcatcgtccaagcatgcggaatttctgttttgcttcgcttcatattggaagcaattgcttttcttacacctgtgacagggatttctttatcaccggctgcagacgcaggatatgacgtctcttcttttggctcaggttttgatgcagacttcggtgcaggagctgctgttttcggctcctcaggattctgttcttgcacgccgcctgtttcaattaagcgctgaatatcttttcgtgtgatgcgcccgccggcacctgttcctgttacttgttcaagatcaatgctgtgctctccggccaaacggagtacagctggcgagtagcgctttttattgggctgatcagctgcttcggtactttttgcagcaggcgtctcagcggcttttgaagcagctggctgttcttgtttttgttcagccggattcgcgccttctgtttcaattttgcaaatcacttctccgacttgcagggtttggccttcttctcccacaagctctgttatcgtaccagtaaaagaagacggaacctctgcatttaccttatctgtcatgacttccgcgatcggatcgtatttgttcactttatcaccgggggcgacaagccatttgctgatcgtcccctctgttacgctttctccaagctgcggcatcgtcatttgttcaattgccatgattgtatcctcccttacgtctttaaaactccgctaattctctcatcgccgcttccactttatcagggttgaccataaagtatttttccattgtcggcgcataaggcatagccggaatatcaggacctgcaagccgtttgatcggcgcgtctaagtcgaacagacaatgctcggatataattgcggctacttcgctcatgatgctgccttcttttgtatcttctgtgaccaaaagaacctttccagttttggacgcagcttcgataatcgcttctttatcaagcgggtaaactgttcttaaatccaccacatgcgctgaaatgccatctttttcgagacgttctgcagcttgtaaggcaaagtggacacacagaccgtatgtgatcactgtgatgtcgtcgccttcccgttttacgtcagccttgccgattggcaggacataatcatcagccggaacctctccctttatcagacggtacgcccgcttgtgctcaaaaaacagcacggggtcttcgtcacgaactgcggcttttaagagccctttcgcgtcatatggtgttgatggcatgacaattttcagtccgggctggttggcgaaaattgcttcgactgattgagaatgatacaaggctccgtgcacgcctccgccgtatggcgctctgacgacaatcggacaactccagtcattgttgctgcggtagcgaattttagctgcttcagaaataatttggttgactgccggcataatgaaatcagcaaactgcatttcagcaatcggtctcattccgtacattgccgctccgataccgactcctgcgatcgcagattcagcaagcggcgtatccatcacgcgctcttccccaaattgttcatagagtccggctgtcgctttaaacacaccgccttttcttcctacatcttccccaaggacgaagacgcgagaatctcgttccatttcttctttcatcgccaaattgattgcatcaatatatgacattactgacatttgttcttcctccctacttcgcatacacataatcaagcgctgactcaggagctgcataaggggcgttctccgcttcatccgtcgcttcatttacgattgccataatttcatccagcatggtttgttctatctcatcggacagcaggcctgtttcctttaagtaagcttgataagtaagcaggggatcactttttttcgcttcctctacttcttcacgccctctgtagctgctgtcatcgtcatcactggaatgtggtgtaaggcggtaagaaatcgtttcaattaatgtcgggccttctcctctgcgtgccctttcgcgtgcttctttaaccgcttgataaacttccagcgggtcatttccattcacagttacgccaggcatcccatagcctatggcacggtcggaaatgttctcacatgcgacttgcttatcgtaaggcactgagattgcgtatttgttgttttcacacataaaaataaccggcagcttatggacagcggcaaagtttgccccttcatggaaatcgccttggtttgaagacccttccccgaatgtaacaaaggctgcgatatcctttttctccatacgtcccgcaagcgcaataccgactgcgtgcggcacttgcgttgtaaccggagatgatcccgtcacaatgcggtttttcttttgtccgaaatgtcctggcatctggcggcctcctgagttcggatctgctgcttttgcaaacccggacatcattaagtcctttgctgtcatgccaaacgcgagcacgacacccatgtctctgtagtacggcaatacataatccatttcacggtcaagtgcgaaagccgctcctacctgtgctgcttcctgtccttgacaagagattacaaatggaattttgccagaacggtttaacagccacattctttcatcgatttttcttgctaacagcatggttctatacatatcaacggcttcctgatcagtcagccctagtgcttgatgtcggtttatactcattcaagcccctcctttatgcttttaaaaatgaatggctttgccatctgcggcaagcgctgcttctccaattgcttcagaaagcgttggatgcgggtgaatcgtttgcccgacctcccacggcgttgcgtccagcactttggcaagacccgcttcagaaatcatgtcggtgacatgcgggccgatcatatgaacgccgagaatatcatctgtatctcggtccgccacgattttgacaaaaccgtcgctttcaccgtatacaagcgcttttccaatcgccataaatgggaacttgccgattttgacattatgcccgttcgcctttgcttcgtcttctgttaagccgacactggcagcttcagggcttgagtaaatgcacttcggcacaagcgtcggatcaagcggatgcggattgagacctgcaaaatgctcaacagcaataattccctcatgtgaagcaacgtgagctaactgcaggccaccgattacgtctccgattgcataaatatgagattccttcgtttggcagctttcattgactgaaatcatgccattttcagtaacaatatcggtgttctctaggccgatgccttcgatatttgcctgtctgccgatggaaacaagcattttctcagcagagtaggtaacggtttctccgtctttttccgcttgtatgctgatatcgtctgatgtttttgtcattgtgtcaggcagcacttttgcccctgttatgaactggatgccttttttcttaagaagactttccatttcttttgaaatctctagatcttcagtcggcaatatgcgatccgcgtattcaataaccgttaccttcacaccaaaatcatgaagcatagacgcccattcgataccgataacccctccgccgacaatgatgattgattgtggcagctcctccatttggagcgcctcatctgaagtcagtacagacttaccgtccgcttcaagacccggaagcattctcggtcttgatcctgttgcaatgatcacttgtttcgggatcagcatgtcattttcttcgccatttccccgctcaacagaaattgttcccggcagcggagagaagattgacggtccaagaatacgtccatatccggtgtacacgtcaatttttccttttttcattaaatgatttacacccgctgcaagcttatcaacaacggcttgcttacgctgctgcactttttcaaagttgagggacacgccagccgtttccaccccgaattgatcggcttcacgagctgtccggtatacctctgcgcttctaagcagcgctttactcgggatacagcctttatgcagacatgttcctccgagtttttccttttccacaacggctgtttttaagccgagctgagcggctctgatggccgcaacataaccgccggtaccgccgcccagaatgactacgtcatactcagttgccatggtgactcactcctgtctgtctattcaatacgatattgtttggattgctcttcgccctgcaatactctgagcgccccttgggcaagagactgcagttcattttcacccggatagactaaaacgtctgaaatccaatctatgtatgatctgatagcagaaacaaagcttttgccgtacgcaaggcctcccgtcagcacaatcgcttcaacttctccttttaacgctgcgctggctgccccgatttcctttgctacctgatatgccatggcatcataaatgaagcgggctttttcatcgcccccttgaatcatctgttccacttttactgcatcatttgtaccgagatagcctaaaagtccgccggtgccaacaagctttttcatgatttcttcttttgtatattcccctgaaaaacatagatcaacaagatctcccgcaggcactgttcctgctcgttcaggactgaatggtccctcgccgtgcaggccgttattgacatctaccactcgcccgcggtcatggacgccaattgtaatacctccgcccatatgggtaataatcattttcatgttctcatatcgtttgccaagagaggctgccgctttacgagcgacagctttttggtttaacgcatggaaaatgcttttccgttcaatttcaggcatgcctgaaactttcgcaagcactgacatttcgtctacgacaacagggtcgacgatatacgaagggatattcaggccgtcagcgatttcccgcgcgataatgccgccgagattagaagcatgctgaccggcgtaaccgcttttcaagtcctcaatcatgtcatcattcactacgtaggtcccgccttcaattggccggagaaggccgcctcttgcgcagactgcatcaaacttcgagatattgattccctgttcatgaagcgtttcgagaatatggtttttacgaaattcatactgatcaataattcggtcaaatcgctgcagctcttctatgttgtgtctcaatgttttttcaaaaatgcttctttcattatgaaaaacaccgattttcgttgaagttgagcctggattaattgtgagaatgcgtttttcgtcatgtagcactttcataacctccagatcaatttcttaacgtctgcttaatacactgtggccgttttgcaaaaactggcttcttgagcggcgcatgcgttcaatccgttcctctgccaagcggtcagccgctaaatatgcaggaatgccgtcacgctgagaaatctcaagtacacgctcgatattgccgtaaatgccttcaacttttttcaatgcacgttctgcattatagccgtaaagctcatctgccacgttgatgacaccgcccgcgttaatcacgtaatccggtgcataaacgatgcccatttcgtgaatttgatcaccatggcgtgtctcttttaattggttgttagccgcacctgcgatcactttcgccttcagctgtttaatggtgtcgtcgttaatagtcgcaccaagggcacatggcgcataaatatcgcagtcttgtgaataaatatcatcaggatctaccgcccgggcgccaaaatcttcaactgcacgctgtacagattgtttgttgatatccgtaacgattaagtttgctccttcttcatgcaggtggcggcaaaggttataggctacgttcccaacaccctgtacagcaatggtttttccttcaagagagtcggttccgaaagcagctttagctgctgccttcattcctctgtacaccccgtacgctgtgactggggacggatttccagaagagccgaaagcaggagaaatccctgtaacgtagtctgtttcatcatgaatgatatccatatcctcgaccgttgtacccacatcttcagccgtgatgtatctgccattcagcccttgaatatagcggccaaacgcgcggaacatttcttcatttttgtctttgcgcggatcgccgataatgactgtttttccgccgccaaggtttaagcctgccgccgcgttcttataggtcatgcctctagccaatctgagcgcatcttcaattgccgcttcttcattttcatatgtccacattctcgttccgccaagcgccggaccaagcgttgtatcatgaatcgcgataatcgcttttaatccagattgttcatcctggcagaataccaattgttcgtaatcgtatttctccatatatttaaaaagttccatgttcgttcctcctaatgtgtgtattcttcagatgcgcatattgccagcgcaatggaatacagtttattttcagcagagtccgctctgcttgttaaagcaatcggtgcttttgctcctgtaatgacagccgccacgctggccttggcaaaataaatcagtgatttatataaaatattgccggcctcaattgttgggacgagaaggatatctgcgttgcccgctacgtctcccgaaatttttttctgagccgcggcaatttgtgaaactgcgttatccaaagcaagcggtccatcaacaatgcagcctttgatctggccccttttgtacatttgagctagagcagctgcattcacggttgcttccatttttgggttcaccgtttcgaccgctgcaagagcagctgcttttggcatattgttccccactgcatgggccacatgaacggcattttgcaaaatctgccgaagctcttccagcgaaggagcaatattcattgccgaatctgtcacaaacatcagccggtcaaaatccggtatatcgaatacagccacgtgagaaaggacacttgctgaccgaagcccctcctgtctgttcaataccgctttaagcaaaacagaagtcggcacattgcctttcattaaaacgtccgctgttttatgatgcacagcacgaaccgctaatttcgccgattcctcaggagtatcggcatggacgatttccacttgatgcccttgcatggatgatgtcagctcgttcagttttgtgctgtcgcccgttaacaagaaacgggcagataggtgctcggctgccagctttacagcccggatcacttcctcatcctcagcatgagcaaccgcaatggtcttatttttgtgtatcgacgctttgccgattaaatctttcagcttcatctgttaccacctttcttgtttcgactccgccttttattatgcaagttccatgccagctcttaagggtgctgtcataccaggtatattgaaacattcgtgcagatgtttgcgtttattctgcaaattattgcatgccttcatttgcaaggccatatttatccattttgtaatataagttccgaatgctgacaccgagagcttttgctgtttttgtccggttaaaatgatgcttttcgagcgtttgctggatcaaatgtgcttcaaatttttctactgcgacagacagcttttcgccttcaatatccggaaaatcaaaacctgttccctgatctgtgtcattttctttttgctcaagttcgaatacaggcaagtgatctttttcaatccattccatatgcggattcagaaaaatcatggctcgtccaaggacattttcaagctcccggacattcccaggccaatggtaggcagataaggcgcgcaaggcttgttgtgagagcccttttacattcctgccgtaatcccggttgatcttttggataagtctgacgctcaatgcttcaatgtcctccaaccgctgccgcaaaggcgggatggagatcggatagcgattgatccggtaatacaggtcttcccggaatgttccgtccgccatcgccttttcaatatttacatttgtcgccgcaatcactctgacgttgacagggatcgctttcgtgccgcccactctgacgatttccttttcttgaaggacgcgtagcaatttggcctgcatattttgtgtcagctcaccgatttcatctaagaaaatactgccgttatttgcttcctcaaataaaccctttttaccgccgcgtttcgctcctgaaaatgcaccatcctcatagccgaacaattctgattcgagcaggttttcagaaagggctgcacaattcacgcgaataaatttattgtatttccggtcactttcgttatggatggcatgggcgaacagttcttttcctgttcctgattccccgcgcagcaagatggttgccggtgttttcgcaccgagcttcgcctgctcaagcgcaaccagcatttgctcgcttttgccaataatgtcgtcaaacgtgtatttcgcttcaagcgtgcgaataatttgtctggcgcgattaagctccgctgtcagcattttaatttcggaaacatcgtgaatcacgccgacgctgcctttcaaaatcccgtccacaatcaccggtgctacattaacgatgacctctttttcattcgggccgaccttcattctgacaccgcggacaggacgtcttgtttcaagcacctttaaatgcatgctttcgccttcggaaatatcagtgtttgcaggcttgccgatgacttctttttcagaaagccccgtcattttcgtatacgctttattgattagcaggccgatgccgttttcatcaacgacagaaatcgcctcatcggaggattgaataatcgcctccagcatcgtacggacctgctttaagttggtcacttcctctgccagctcgaccgcatcagtgatatctttaaacacacaaagagcaccgagcagacgtccgccttcatcaataatcggcagtcttgtggtcacaatttgcaaatgatcgcctaacagctgcttctggttgtattcaggcactcttgtttttaaaatccgcggcatcttcgtgctcggaatcacttcttttattgggcgcccaatgacttcctcacgtttttttccgaccattttttcggccatatggttaaagagaatgatttcttcattgatatcaataaaaatcattccatcatgggtggaattaaaaattctgtcatatttataggtttgctcttttagcatttgaatcaggtgctgcttttcttccatcagctgaaaaacgatgtatgccatttttcccggcatgacaatggtatcttcatgctttctttgaaggagctcgtcaaacacggcttgatcgccggtggtatgaatgacgatatccggtttttgttgtatgtaaggtttccaatcagatgatacggcaatcccatacttttctgcttctttcaatcccggcgcctcggggtctttgtcaactacggcaatgatatctatgatggctgttttaatcagaatatgtaataacgccgttccccttttgccggcacctactatcagtaccttttgcatcccgatacccctttgtatgaaaaaatttgcacacctatttattccgttgcaataatttgcacaaccctatgttaccacgttttcttctcttgacaaaatattttttccgctggacaataaaggaaatgaaaagataaaggggttttctgaagatgagccgacttcttgcgcttttaatattagtcatccccggggctatttctgctttaggcattaaactgatgagagatacacttttcggccatacaatcaagccattttcagctctttggctccaagggttgtcaggattcatcttttttgcgatcggcctctatgtgctggccgggttcattttatacagagacagaaaacgcaatcaagtcagctcgcgattcagaaaacgatagctgaaaaaaagccggagaatgctccggctttttttgttgcattattcgtcaggcaaaacggtcttggcaatcgttttgtctaacgcttcatagtcataataagaaatcgtatcgtacagttcttttcgtgtctgcatatcatgaagtccttctttttgtgagccgtgctccttcatcaaaccaaacatccgctcacaagcttttgccgccgctcgaagcgaggtgacaggatatatcaccatgtgaaaccccatatcttcgaattcatcggcacgataatatggcgttttcccaaattcagtcatattcgcaaggagcggaacggggatacgctcagcaaactggcggaattcattctccgcctgtagcgcttccgggaaaattgcgtccgctcccgcctcaatgtaagcctctgaacgttttattgcggcatcaagcccttcctgcgccctggcatcagtacgggcaacaacaataagggagggtgccgcttgtttaatggcttttattttttgcgccatttcctttatcggaactagctgtttgccatttaaatgtccgcatttttttgggagctgctggtcttctatttgaacggctgctacccttgcttcaagcatctcccgggctgttcgggcggcatttaagacaccgccaaatcccgtatcgatatccacaagcagaggcagatcagctgcacgtacaagatctttggcccgttcagctatctctgccgatgtgatgatccctaaatcaggcagccccctgctggctgtataggcagcaccggacaaataaatagcagaaaaaccggcttctttcgcaagcaaagcggccatcccgtcatgggcgccgggaatttgaagaatgtccggtgctgacatcagcttgcggaaacgcccggcaagctcctcttgtgacgattgcttattgacgatccacgacatgaaacaaatcccccttttacatgcagaacatgtctacgaattcatttacgcgcatcgtttgtaatgtctcatagctggtacagcgctcataaatgtgtttgtgctgtttatcaggaaaatgggttttgagattgtcagaaaacttttccagcagtttcggcactgcttcctctcttcgaaaacgatggccgaggggaaactcacattccaccatttccgtgctcgttccgtctttaaaatgaacctgaacggcatttgagatggaacgtttatcaggttttaaataatcctcggtatatgttttattttcagtcacttccattttatcacgaagtttatctattctcggatcactcgctgtttcagcttcataatgctgtgcggtgatatcaccaaaaagcaaaccgattgctgtaatgtattggagacagtgatcacggtctgccggattgtggagcgggccttttttatcaatgatacggatagcggattcatgcgttctgatgacaactcggtcaatctcgtcaatccggttctttacctgcgggtgaagaatgacggcgcactccgccgctgtctgggcgtgaaattccgcaggataagacactttaaataacacattttccatgacataagcgtcaagcggacgggcaagcttgatctctttcttattgaataaaacgtcttggaacccccaacccggtgcactcagggctgtcggataacccatttccccttttaacgacatcagcgccaaatgaacacctctgctcgttgcatctcctgccgcccatgatttacgcgagcctgtattcggtgaatggcggtatgtcctcaatgctgcattgtcaatccatgcattcgaaagcgcatttttgatttcttctcttccgccgcccaaaagctttgccgcaacagcggttgtcgcaactttgacaaacagcacatggtcaaggccaactcgatttaagctgttttctaacgccagcacaccttggatctcgtgtgctttgatcatcatctcaagtacgtcgcgtactgttaacggctcttttccttcagacagcctcactcttgatacataatcagcagcggcaaggattcctcccaagttatcggatggatgcccccactccgccgccagccacgtatcgttgtaatcgagccagcgaatcatgcagccgatattaaacgctgccctcacaggatcgagaacatatgacgttcccggcactttgcttccattcggcacagtcgttcctggaacaatcgggccaagcagctttgtgcattccggataccgtagcgccaagatcccgcagcccagggtatccagcaatacatgccccgctgttgtatacgcttcggcactagtaatctctttctcaagcacatagtctgtgatttcttcgataacacgatccgttttcggcattctaccagttcctttcatggttttgtttgatatcgcgggcccatgtaactgacgcggggacggaagagccgattattggcatgctgttcgatcacatgggcgcataaaccggacgttctcgcgctgaaaaagatcggcgtatataaaggaatcggtatgccgagcatccaatacactggggcagcatagtaatccaaattcgggtaaagccctttttccttctccatcagccgctcacccgcttcgcacatctcatataaacgatggtcaccggctttatcgcataattgctgcagcgcctctttcatcatgagtgctctcgggtccatttttttcatatacacccggtggccgaagcccatgattttttcttttcttttcagttttgtttgcaaaagctgctcaaaatcagatgtcgtttttgcctccaaaagcaaatacatcacagcttcgtttgctcctccgtgaagattccctttcagggaagcgacagccccagtcaaagccccataaagatctgaatgtgtagatgcaatgaccctggccgcaaaggttgaattcggcatctcatgctcactgtacaggacgagcgaccggtcaaaaatctgttcttccaatgaagacggcaatttccctgtcatcatgtagagaaaattcgcactgtaggatagggtttgaagcggaagaatcggttctttcttattaatgatcctgtagctggcagcagtgagggcaggcattttcccaagaagctgataggcgcgttctttgtttgcggaaggagaccgatcatcaatttgccgatcatagccagcaagtgccgacaggccggtacgcagactatccattggatgagtgtcctcagggagcagctcaagcagacggagatgatcagcaggcaggcttgaggcactgattattttacgttccagcgtctccatttcactttcttctggcagcctgccctccagcaataaatggacaagctccagatagctttttgtttcagaaagctctattaaatcatagcctcttatcaaaatctggctggactgcgtgtcaagataagaaatatgagtttctgccgcaatcacaccgtccaaccctggagaatattgctgtttctcctccatatcctcaacctccgtttttgcgttttttgtctatcaggttccgccaagcaaatacttggaaataatcagtctttgaatctcgttcgtcccttcataaatttgcgtcacctttgcatcgcgaagcaggcgctcaactggataatccttcatatagccatatcccccataaatttgaacggcgtctaacgccgcctttacggctgcatcggaagcaaattgtttagccatagacgcttcttttccacagtttaggccgcggttatgaaggtctgcagcgtggtagacaagatgtcttgccgcctcagctctagtcgccatatcagccagcttaaatgaaatggcttgattggctgcgatcggccttccaaattgcactcgctgcttcgcataatcaacggcatgctcaagagccgcctctgcaattccgagggcctgtgccgcaatgccgatccggccgacatttaaattcgccatggcaatgtgaaagccatccccctctttgccaagcaaattggcttcaggcacttctgcattatcaaaaatcagttccgtagtattggagccataaagccccagctttctttctttttttccaacggtaaaaccgggtgtgtttttttcaacaataaaagccgaaatcccgtgcctgccttgatctggagctgttaaagcaaatgtgatatagatatcagctgctccgccattcgttatgaatattttcgatccgtttaatagatatttgccgttctttttgattgctgttgtgcggaggctcccggcatccgaccccgagtgaggctccgttagtgcaaatgcgcccaaatggtctcctgacgcgagctttggtatatatttcatcttctgttcttcgttgccgaagtacagaatcggattcgtgccgactgaggtatgaacggagagaatcacgccgacagccgcgctgattctagaaatctcatgaatcgccaaaatataagaaacaacgtctgccccgacaccgccgtactgttccggcaccggtattcccatcaggccgtgttcgcccatttttttgatcagctgaaagggaaattcgtccgttttctccatgatttccgcagcgggagcaatttcttttcgtgcaaaatcacgcaccatttttcgcatcatgacttgctcttgggttacatgcaactcggccacccccggatggaatagacttcaggaagtcctctcctcatagtcataaaaaccgcgtccgctctttttgccaagccagcctgctttgacatacttgcggagcagcgggcatggacggtatttggaatcgccaaggcctgagtgaaggacttccataattgataaacacgtatccagtccgataaaatccgctaatgcaagcggacccatcggatgattcatgcccagcttcatcacttcatctattgcctccggcttcgccactccctcatacacgcaatagatggcttcattaatcattggaagaagcacacggttggaaacaaacccaggaaaatcattgacttctaccgctgttttccccatcttttccgctaatgccataacatctaaggccgtttcttctgatgtagccaagcctcgaatcacttctaccagcttcattacagggacgggattcataaaatgcatgccaataacccgttgaggccggtttgttacagcagcgatttctgtaataggcaaggaagatgtattgctggccaaaatcgtatgaggcgggcaaatgcgatcaagtgttttaaacatctcagtttttgccgccatgttttctgcgatagcctcaatcacaatgtccgcatgctctgcctcctcaagcgtttgagaaatcgaaatgcggttgattacgctcttcacttccgtctcggtcctttttcctttctcagcatcacgggccagctgtttcttcagccgtttcaatcctgcctccgcggcctctggattcacatcatacatccgcacataaaagcccgcgccggcagctgtttgagcaattccgcttcccatctgacctgcgccagctaccatgatttgtttgatttccattcaaatcccctttttcatcatgttttaatgaacctgcactaagacggcgtctccctgtgctgccccgctgcaaatagcggcaacgcccagaccccctccccggcgctttaattcataaacaagcgtcatgagaattctcgccccgctcgcgccgatcgggtggccgagcgcgatcgcaccgccattcacatttactttttcaagatcgaaacctacgattttttcacatgtcaaaacaactgaagcaaaagcttcatttacttcaaacaagtcaatatcttggacagttaaaccattctttttcaggagcttgttaatagcaaaccccggcgctgccgccagctcgtgcgctggcattcccgtagttgaaaaaccaagaattgtagccagaggccgtttgccaagctcagcagctttttcctcagacatcagcacgaacgcgccggctccgtcattgactccaggagcattgccggctgtgatagaaccgtcacttgcataaatcggagcaagttttgcgagctgatccagacttgtgtcacggcgaatcgcttcatctttatcaacaacgtttggttttccttttcgaccgatccagttgacgggaacaatttcatcctgaaacttcccttcatcggcggccttagctgcccttgcatgacttctcaacgcccattcgtcctgctctcttcgtgagattgcatattccttggcagctgtatttccgtgaacagccatgtgcacctcgtcaaatgcgcacgttaatccgtcatacaccattaagtccctaagctcgccgtcccccatccgtgctccccagcgcccggcgggaacggcatacggaatattgctcatgctttccatcccccccgcaacaagtatgtccgcatcctgcgcccgaatcatttgatcacataaagtgacagcgcgaaggccggaagcacagactttattcagtgtttctgacggcacactccaaggcattcccgccagacgggcagcttgacgggaaggtatctgccctgagccggcctggacaaccatgcccatgacgtttccttctacatcatctccagagactccagcccgttgcagcgcctccttcatcacaatgcccccaagctcagcagctttcacctctttcaatactccgccgaatttgccaaatggcgttcttgcagcacttacaatgactgttttcctcatggtttcacctcattcagaagatagacagcgcttacaatttctagttgtcttctatgaatgtatgctttgaaacgggcatgaatgaatgaaaaaagaaggctgcgtcaaacagcctccttctaacaactattcatttttcagcaatgccgaagccttttctggaaagtcggtaaacatgccgtctgctcccgcttcaatgagacgcttcatatcttccggacgattgactgtatacggccttaccttaatcaaaccgttcctcattttcttcagtacttcatctgtgacccctgggctgtttaacttcgggtgatagccggaagccggaatagacgcgatatatcgatctgcctgataaagcacatctgaagttaatactgcccgttcgatatgcggtgcaagccgggcgcacagcgccaagctgtcatgattaaacgtggataggatgactctgtcctctacattaaatcgcttcactgcctccagcactttttcttccattccctcatagcggatcacgctgttttttaattcaatgttgatgagaaaatccttttttaccgcccacgagagcacatcttctagcagcggcacttttatatcgctgtacgcttgatcgtgaccagcggccgcatttgcagtctttacctcatcataggctgtatccttcacgaatcctttaagtgatgtcgtgcgattaagtctttcatcatgaattacaacaatgcgtccgtctttcgtcagctgtacatcaagctctatcccatccgctccggcttcaattcctttttcaaatgcaagcattgtattttcgggaaattgacctgatgccccccgatgggcaaaaatctttgtcatcgtttcacctcaaaccctaaagttttctccattatacttattttgtcggctccactctaggattaaggctgtatcaatctactgatcataataagaatcaatgccgttgacaatcgcatctgcggccttttgctggtattcttcacttcccagcttgtccgcgtcagagctgttcgtgataaacccaagctccgccaacacacttggcatttgtgaatatgtaatgacgtaaaagtctgattctttcacgcccctgtctctcgtttgtaaggaagaaacgagctctgactgaatatcggatgcgagacgccggctgttctccccttcataatcagattgaaaatacgtttctgttcctgaagctgaagcaacccctgaattcacatgaatgctgacaaaaaggtcagcctgattggcacttgccttagccactctttcctccaaggtcagaaaatgatcgtcagaccgggatgcaacaggattggctacctcctcttttagtttgtctgtcacatgctctgagacagccaaattaatatccttttcaaagagcccgtttccgaccgctccactatcttcaccgccgtgtccggcatcaatatacactgttttcccttctatcggctctgctgcctgtgcacaaggcgcgagcgtcaaagccaatccgcacagcgccaagctcctccataacattctcaacttactccctccggtcacgagttctttcgcagctgaatatcttccagctgtaaagttccattatccttctttgtatatttcaccaggacatgtgtctgatctggcagtgattcacattcatcacgtttatccttcggaacttgtatcatggtttcttctccattaagagaaaccgcaatcgtatgaggatcagccgagccaatgtattttccctcttcggtaaaccttggcactgagtcatccgcacttgcaacactgcaccccgaaagaaagagcgcagtaaacagcaaaagaaccgtttgtttcacatgaccacctcttcctgatgtttggcttttatctttgaccagaatggcgaatttgtaaagacaacgcgaatgcaggcgagcaagttccatgattttcaaaagggctatacgacccgatcatttcctgttgttagaaagataacgagcagatttgtctatgaggatggctctaattgaggcgtcaattagaaaaaattagcggaaagaagcaactttttattcattttaaaaaatttgagaatagggtgagcaaatcgtttgacgggtgggtcagccaagcgtaaccttttaaaggatatttactttattgaaagaagttaaaaccatgaaaaaattcgttctgctgctggcggcagctgtcatcacatgctccatcggccaccaaatcagcggcggctacaaaggccccgaaaaagagcggcgaaaacatcactctgcactcaagatattcagtcggtaaagcagatcaattgcattaatttttacatataggctagaatatgtgcgaatccaaacgaaagaagatgatcaaatgaatcctaagtataagccactttttgaaccatttacgtttaaaagcggcgttacaatcaacaaccggatcgcagtagcaccgatgactcattacgcttctaatgaagacggtacaatatctgaagcggagctcgactacatcatcccccgttcaaaagagatgggaatggtgattacagcctgcgcaaatgttacaccggacggaaaagcattccccgggcagccggccatccatgacgattccaacattccaggtttaaaaaagttagcacaagccattcaggcacaaggcgctaaagctgttgtacaaattcatcacggcggtattgagtgcccgtctgagctcgttcctcaacaggatgttgtggggccaagtgacgtgtttgataacggcaaacaaattgctcgcgcattaacagaagaagaagtggaaaacattgtgaaggcgtttggagaagcgacaagacgcgccattgaagtcggctttgacggtgtcgaaattcacggtgcaaacggctacttaattcagcagttttattctccgaaaaccaaccagcgcacggatcgctggggaggaagcgatgaaaaacgattagccttcccgctcgctattgtcgatgaagtgaaaaaagccgcttcagaacatgcgaagggtgcgttcttagtcggctaccgcctgtctccggaagaacctgagacaccgggattgacaatgactgaaacttatacgcttgttgatgctttaggggataaagaattggattatcttcatatctcactgatggacgtgaactcaaaagcgcgccgcggtgcagatccgactcgcacacgcatggacttattgaatgaacgtgtcggaaacaaagtgccgctgatcgccgtcggttccatccattccgctgatgacgcgcttgccgtcatcgaaaacggtattccgctggtcgctatgggacgcgaaattctagttgaccctaactggacggtaaaagtaaaagaaggccgtgaaaagcaaatcgaaacagtgatcaaaggcacagataaagaaaaatatcatttgcctgaaccgctatggcaagcaattgtgaacacacaaggctgggtgccttataaagattaatgtgcaaagactgccgaaacgattcggcagtcttttttccctttatataaatagtttgtgtacacatctaaacagcaaaagaaagagctccccaccaacttcgaaaagaaaatccaggaaaaacccctcacgctttcttgcttttttctttttcattcgtacgtctcctttttacatgaatacgccttacttacgattttgcaggagaaaggtttcattttataacggacacatctagggtcgatcatgcttcgtgatcctataagatgtatgaatggaccaagagtgcaggtaataccgccatttgctttccttacttttcaaacctatcctttactatatgcggatacttaatattcttctcccatactaacaaatgtccccaaaacaaaacgcctcctatttatcagcgcaaactaataaataaaagacgtttgatttaatgaccacttaataagctcatgtttaagaagccttatgttctaatctcagcttatccgcaaccattgcaatgaattccgaatttgtcggtttagcttttgtcatgctgacagtataaccgaacaacgaggaaatggaatcaatgtttcctctgctccatgccacttcaattgcatggcggatcgctctttctacacggcttgcggttgtgttgaattttttggcgatgtccggatagaggacttttgtaatgctgccgagcaattcgatgtcattgtataccattgagattgcttcgcgcagatagagatagcctttaatatgggctgggacgccgatttcatggataatgcttgtgatgctcgcgtcgagatttttcttctttggttcaggctggctgctgcgtataatactgctttgcgatgatggcgcacgatgcgtcacactgctggcatttccgctgacctggcggatatggccgacaaggttttccatatcaaacggtttgagaataaagtaggacgcgcctaaatcgacggcctttttcgtgacatcttcctgtccaaaggctgtcagcataatgacattcggctgttttttcagatctgattccctcagcctctctaaaaccgcaagtccgtctaaatgcggcataataatatctaatacgagcacatcgggatctttttctttaaacagcgacaggcattcctgtccgttataagcaacgccgatcacttccatgtcttcctgtccttctatatattcacttaacaggcttaccagctctcgattatcatcagcaacacaaactttaattttctccacgtttcttcctccccaaatgtagttaacaggattcacccttgctacatgtttacattcgacaaaaccgctatataccctctaaaaaaatcataatcaccaatattagtggcatatctttgttattctatgtttttctctgtttttcgactaaaaatgaaatttgacaaacaaggaaacgtgaatttgtcgaaaaatcttcttttgtatattttaccgtatgtattctgagaagtgaagagggatcaaaataaaaaaactgccggaaactccggcagtcagcttgctttttcttttccataaatatcgattcctgcttctgacagcatccattcaatatgaacaccgtagccgcttgtcgggtcatttacaaatacatgggtgacagcaccgatcacttttccattttgaatgatcgggcttccgctcatcccctgtacgatgcctcctgtttctttcaacagtcttggatcggtaattttcaacaccattccttttgtcgcagggaatttttgcggcgttgtgctgacgatttcaatatcgaatttttctactttgtcatcatcaataacggttaaaatttcagccggcccttttttgacttcggtagaaaacgcaaccggcaatgcttgatctgatatgttgttttgaatcggctgatgcagtgtgccgaaaatcccaaacgggctgtttctgttaatatccccgatcgttttgcgttctgaggaaaatcgcgccagtttttctcccggattaccgcctgtccctttttcaattgatgttacagtggatttaacgatttctccattctccactacaattggtttctttgtgtccatatcggaaatcacgtggccaagtgctccgtatttttttgttttcggttcataaaaggtcatagtgccgatgccggcagcagaatctctgatatataacccgattctgtatttgccttctccttcatccttttctgggatcagcttcgttttgattttctgtttatcacgtttgatcagtaagtctaaagattcaccagttttcccagccttttgaataaatggggctacatcattcattttttcaattttctgtccattcatctcaataatgatgtcgcccgcctcaattcctgccgtttctcccggagattttttgccttcacttgtattgatttgatgaaatccgacgacaagaacaccgacggaatgaagttttacaccgattgattgtccgccaggtataacttttaaatcaggaagaacatgcacttttgtttttttaattggaaatccggcaagatcatataccaattctgactcacctgattttttgcccgtcaccttgatttcatgcggatctttctttactgtaaacgcttctgaggattctgatgtctgagcgtttaccgataaactcgtttcaatcgcttgtgtttgggtttcaaatactctcatttgcgttggaatcagtaaatattcttttagcggtttgcataaacctacacttaataacgaaacaaggagaattaaacctactgcttttctgatgttatcgggcattcactacttcactctcctcgctcctatcccacaccttctttatgacttgctgctacatcatttaattttgccttctgacggcttatttataactgtcatatgaagaaaaacattggatatactgatgaacgaatggatgtgcacgaaaaaaataagctgcgcttctcgcgcagcttacccagttgttttgacttgatccgcttgttttaaaagttctttcgcatggcgtttcgttaaatcggttacctcgacacctgcaatcatgcgcccgatttccgctaccttttcctgcttagacagcggcttgacacgtgtcgtcgttctaccgtcttttaactccttcgcaatataaagatgcgtatcggccatggcagccacctgaggcaggtgtgtaatgcacagcacttgtgaacctattgacaccttatggatcttctcagcgattgcctgtgcgaccctgccgcttacaccggtatcaacctcatcaaaaatgatcgatgtcacatcctgttgtgaggagaaaatgctttttatggcaagcatcacccgtgacagctctccacctgaagcgactttcgaaagggattttagcggctcgcctgtattggttgaaattaaaaacttcaccaggtcaatcccttgttcagtcagctgaacgggctggccgtttacaagcggcgcctcttcattgcgtgacgctgttctgaccttaaattccgtatcaaaagttgatttttccatgtacaggctttttaattcccgatgaatctcatcagccagctttttcgcccatgtttttcggatttgtgacacatttgccgcttccactgcgacatctttgccgacggagtcaagctcctttttcaagctttgaaggtggctgtccctgttttcaatttggtcaatctcttcttcaattttagaagcatattccaaaatgtcttcaacagtggcaccgtattttcgtttcagctgtttgatttcattaagtcgcgtctcaatatagttcaggcgttccggatcaaattcaagctcatccagcatatttctcatctgaaatgtggcatcctcaagcaaatagtaggagttcgaaacactttcagacatttttttcagcggttcgtttatatcagatatatcttcaagctgcgctgatgccattccaacccagtccaatccgccctgctcactgcgaagcgcgttatatgcattttgcagcgactcatatatcttctcaaagtttgaaatttgctggcgctcttcttggagctgttcatcttcgttaagctcaagctttgccgattcgatttcttcgagctgaaattgaataagatcaagacgatgggccatttcctgttcgctttcagaaagctgcttaagctttttgagcagcttcacataccgctggtacccttcctgatacgttttgagcgcgctttccacttcggccccggcaaacttgtccaaaagctggagatgattttcgtcttccattaacagctggttatcgtgctgcccgtgaatatctaataaaagcctgccgatctctcttagtgaagcaatcgtgacaagcttgccattgacacggcaaacgcttttcccgctcgtgctgatatcccttctcatgacgatcatttcgtctgaaacgtcgattccctgctcagcgcatacgcctaaaacaggatggccgctctccaacagaaacagcccttcaagttcggcttttgcttccccatatctaacaaattcagatgatccgcggcctccgactaaaagagaaatggcatctatgatgatggatttgccggctccggtttctcctgttaaaaccgtaagcccgcgttcaaaagaaaccgtcagttcctcaataatggcaaagtttttaatcgatagttcagctaacaaacagcattacacctcttatctttgttagattttctgttacagcagttcaaggagcctgttttttacgccttctgtatcttcaggagtccggcaaataattaaaatcgtatcatctccgcaaatggtccccatcatttcatcccagtccaaattgtccatcagcgccccgattgcctgggcattgcccggcatcgttttcagcacaatcatatggcttgctgagtctattttcacaaatgcgtccatcaatgcccgctttagctttgacagcggattgaaacgctggtccgccggaagactgtatttgtaagaaccattatttgtaggcacttttacaaggtgaagttctttaatatcccgtgataccgtggcctgcgttactttgtatccatcctgctttagcatgtcgaccaattcatcctgtgtttcgatttcattgcttgtaatgatctctctgattttaatatgcctctggcctttgttcatgtaagcacctctatttccaagcttatctgttcttttatgttatatgattctctgcacattgtacatgaatgcagaaaaaaggaataatagcgccctattattccggtacatctgcttttttttcttttaacgtcttatgtgcttcttctacaacgcgcatgatctcttcttccggcagttcctggccttcctgtccctctcccggccaatgcaaatgaaggagaaactcaatatttccgtctcctcccgtgattggagaaaatgacaagcctttacagatatagccttcagcggcagaaaaactgatcattcgcttgagcacatcagcatgcactttaggatctctaacaatcccttttttgccgacggattcccgtcccgcttcaaactgaggcttaactaaagccatgcagtcgctgcccggtacgagcaaagtccttaggacaggcaggatgagccgcagtgaaataaaggacacatcaattgtggcaaactccggcatgccctttgtaaagtctgccggtgttgcataacgaaagttcgtccgttccatcacgacgacccgttcatcctgtctaagcttccatgcaagctgattatagcctacatccacagcgtatgactgtttagctccattttgcaaagcgcagtccgtaaaaccgccggtggaggagccaatatcaatcataattttatctttgacagagacgggaaattccttcaacgctttttcgagctttaagccgcccctgctcacatacctcagcgggtttcctttgacagttaacggaaggtcgcggtcaattttttctccaggcttgtccaagcggttttcgtttgaatagacgatccccgccataatggctcttttggctttttcacgcgtttccgccagccctctttccactaataatacatctaatcgttctttctttgacgtcatgatccaattcctttgtgtgtctttggcggcatcagtaatctaatacgatttgccacctgctgttttgtcagtccaatttcctcaagaagcgctgttacacttccgtgttcaataaaccgatcaggtatacccattctgtcaatcggagtatgatattcaccttgatcatgagcgaattctaaaatcgagcttccgaaaccgccttctaagaccgcttcttcaattgttaaaattggcaagccttcttttaggatactcttcatcatcttttcatcaatcggcttaataaaacgcgcattcacaacgcgcacggaaaggccttctttctgcagctcttcggctgcttcaatcgccatttcgattgttgtgccgaatgttaagatgacagcatcgttccccggacgcagcacctcccacgtaccgatcggaatcgttttcaactgttcatccatttttacgccgagtccgtttccgcgcggaaaacgcatcgctatcgggccttcgtcatagctaagtgctgtatgaaccatatgctggccttcattttcgtctttcggcatcattaagaccatgtttggaatgtggcgcataaacgcaatatcaaacacgccttgatgtgtctctccatcagcgccaacgagtcctgcacggtcaattccaataaacacattggcgttttggcggcagatgtcatggacaacttggtcatatgccctttgcaggaaggttgagtaaatcgccaaaaacggcttcataccctgcattgccatagctgccgccatcgttgcggcatgctgttctgcgattcctacgtcgaacatccggtcagggaattcctttgcgaaaccttcaagctttgaaccgacaggcatagccggcgtaatggctacaatgcgtccgtcctcgcgcgccattcgctgcacagttccgctgacaagaccgctccacgaaggagctgcggctttcggctttacaaagtcaccggtattaattttatatggtccggtaccatgccatgtcccaatcgtatcggtctcagccggtttgtaccccttcccttttttcgtgatgacatgcagaagaacagggcctttcgtttttttggcgtattgaagattctcaatcagctcatgataagaatgtccgtccactggacccaaatacgtaaaaccgagctcctcgaaaaacattccggagacgagcatgtatttcaggctgtctttgactcgttccgccgtggcggcaagcttgcccccaactgccggaatctttttaaataagtattcaagctcatctttgacccactggtatttccccgcagtacggagccgtccgagcatagagtgaatggcaccgacatttggtgcaatactcatttcattatcattaaggatgacaatcatgtcttttttctcgtcgccgatgtggttaagggcttcgagcgccattccgccggtcagcgcgccgtcaccaattatcggaataatatattcatccgttcctttaatatcacgggcagctgccattcccatcgcgcctgacagagaagtcgagctgtgcccggtttcccaaacatcgtgctcgctttcactccgctttggaaatccgcaaagccctttgtactggcgaagcgtcgcgaattcttttcctcgtcctgtcagcagcttatggacatacgattgatggcctacatcccataaaaatttgtctttcgggctgttaaattccttatgcagagcaatagtaagctctacgacacctaagtttgggccgatgtggccgccggaagcggataaacttgtaattaaaaactgacggatttcatcacttaatttctctaattcatcaatggacatgttttttaaaaacgacgggtcctgtattgataaaagatccaaagcggatcaactcactttcagcatgaatttctgcaatgatacatgtcttttgcatgccgagctgacaataatctcagacataaaaaaagacaaacgcgcttttccttttcatttttcatataaactgcttacattttaccatacctcgtgcagccgcttcaaattaggatcgttttagtgatctcttgccgcaattaaatcacaaagctcatataaaaggtctttttgaagagagagtccgccgatcaatcgcttcgcctcttttatatgaacatccaatttatgtttggccccttccaatgaaagaagcgacgggtatgtcgatttgtcatttgtggtatccgagccgacacgtttgccgattttctcttcactgccttctaaatctaaaatatcgtctctgatttgaaatccgattccaatgtggctgctgaaggtacgcagtgtttcaatgtcttcctcaggcgcatcagccaaaatagcaccggcgattacacaaaagccaaggagcttggcagttttccgttcatgaatggattcgagctcttcaagcgtgacttgtcggttttccgcttccatatcagctacttgcccaccgaccatgccttcggtgcctgccgctgaaatcagttcattcacaagccgcaggcgcttttctgctgacacctcgtctgacacgtgggaggtaatcagcttaaagctttctgtgagcagcccgtcacccgctaatactgccgtcgcttcaccaaacactttatggtttgtcggcttcccgcggcgcaaatcgtcatcatccatgcatggaagatcatcatgaattaacgaatacgtgtgaatcatttcgacagcacagcccaccggaatgccgtctttttcgctttttccatatgcatttaaaacagccagtacaatcagaggccgcagccgctttccgccggcctgtagagaatacagcatagatttctttaatgagtccggcatatcaagcttttctgtatagacagaaagctgattttcaattgtttttttccggtccgccagaaagctcgttaatttatttgtcaccttcgtcttcctcctgaacactgaaaggtgccagttcgccgtcttcttttaaaatgaagtccatttgcttttcgactttttgcagcttttcatggcacatttttgacagagccatgccttcttggaaatagttaatggcttgctctagaggcacatctccctcttcaagctttgatacaatgctctcaagccctttcatcgcttcttcaaatgtcatgttttcattttttttcacgtctgtcatttttcttcccctctcttttctaatacttcacaggtcagcacgccatccttcagcttgacttcaagccggtcctgctcttctatttgactgacacttttaatgagtttatcttctttataagccaagctgtatcctctttccatcacttgaagaggacttagtgcattcagcttgccaagaacggtttgaaattgggaatgcagctgcttcatttggatattcatattttttctcagctgatttgtttgttcctggtatcgtgttctcgcttgtttcagctgttcatgaggatgcagtgcctctaatctgtacgtttcacgctccagctgtctgcttttccgatctaaaagagcggtcagctgtgcttgaaactgctggtacgcgaggtcaaactgctgctctttttgcgcatacaaacgctttggaaaacgaaaggcataggacgattgcagcgtttgaatccgttcttttttctggccgaggtgctgctgcatcgctcttgtcattctgacttccgctgtttttgtccgttcgattaaatcagtggtatgaggcacagcaatctcagctgctcctgtcggcgtcgcagctctgatatcggcgacaaaatcactaatcgtaaaatccgtctcatgtccgactgccgatataatcggaatattggaagcaaagatggcgcgtgctacaatttcttcattgaatgcccacagttcttctatcgaaccgccgcctctcccgacaattaatacgtcgcaaatctctttttcatttgcctcttcaatgcgcgtaacgatggatctgctcgcattttcaccttgtacgagcgctggaagaacaatgacttttacaaggggatatcttctttttagagttgtaataacgtctctgacagcggcacccgttggagatgtcacaaccccgattgtggctggaaatgcggggatttgttttttgtagcggtcgtcaaataaaccttctccggcaagcttcttttttaattcttcgtacgctaaataaagcgctccaatcccgtcaggctgcatttctttggcatataattgatagtttccgctcggttcatatacggaaattccgcctctgaccagcactttcattccgttttcaggtttaaaaggcagacgctcgctttgtctcgcgaacatcaccgactgcattcttgcgttttcgtcttttaaagtgaaataaatatgccctcgtgtgtgtatctttacattcgacaattcgcctttaatccaaatattttcaaggtgaggatctacatcgaattttcgttttatatactttgtcagcgctgagacggtcacatacgctgcttcacccatgtctaaaaactcctctcctaagcattcctgcaccataactaaagaaaacccgccctggctttaggagcctgaagaagcgggtatcgtgctcatattcaaggcgggcaaacatttcgcctgtgaatatctccaattatctatgataacgtacgtttcgcagatttaacagtattatgcgcaagcatcgtgatggtcatcggacctactccgcccggaaccggcgtgatgaaggacgctttttcctttgccccttcaaattcaacgtctccgcaaagctttccgttttccagacggttaacgccgacgtcaatgacaacagcgccctctttgatctggtctgcactgatgaagttggctctgccgactgccaccaccaggatgtccgcttttttcgtatgttcagtaatattttctgttcttgaatgacagtaagtaaccgtcgcgttttcatttaataaaagctggccgacaggtttgccgacaatgttgcttcggccgactacaacaacctctttaccggaaaggtcaatattggttttcttcaaaagctcaacaattccatgaggcgtgcaaggaagaaacgtatcttcgccaagcagcattttccctacgtttaacggatgaaaaccgtctacatctttatcaggggagatacgttcgatcaccgctttttcagaaatatggtctgggagcggaagctgaacgagaatgccatgaaactcagggtcttggttatattgatcaataatggaaagcagttcagcttctgtgaggctgctgtcaaattgatcgagcttgaaattcattcccattgtttctgccgcttttttctttcctcgcacgtaagagtgagaagcaggatcatctccaatcaaaataaccgccagtccgggagtgacgccttgctttttaagctcttctacctcttttgccaattgttcgcgtttttctctagccgtttcttttccgtcgatgattgttgcagtcattttctttcctcctatgattgttcaatatcagatttaatgttagaaagaaccccgtttacaaactttgtcgctttgtcatcaccaaaccgttttgccagctcaatcgcttcgttcatggagacattcaccggaatgtcttcggcatatgccatttcatatgctgccaggcgcaaaatcgcacggtcaacattggcaatccgatcgagcttccaattcaccagatgcttggagatcatttcatccagctggtcttggtgttccaataccccgtgtacaagctgttcaaagaaaggatctgttttttcttcatccagtgcgtgttctatggcttcattcactgcaatatcgctgacatcaatttgaaatagtgcctgcaaagctttttctcttgctgttcttcttttcattttctttctcctttgatcctctttatccgcttgtcgttaagccacaaagagatcataacatatttttttcgtatccgcatattgaaatcaaggtttttttaccctattaccgaatattttcacacaccttaatatgattattcggatttcacgttcatgaagaaactcggctatgtaagccggctttcttcatgctttgaaataaagggtaacgtgtaaaaaaaccaaagggccgccctccccttggtttcgtgttaagccatttacatttcttcgtcgatttggacttcttgggcttttgtgtcaaattgaatgccgacgatgtgaatattgatctcgttaatcgaaagagacgtcatatttaataaggtttgacgaatgttttcctgaacggatgctgcaactttcggaatcgaaacgccaaatgtaacgacacagtatacatcgatcgtaattccgtcatccgccaggtcgactttgacacctttgccatgattcactttgccaaagcgctcaacgacgcctgtcgcaaagtttccgcgcatttcggcaactccatcaacttctgatgctgcaatgccggcaatgacctcaatgacctccggtgcaatctcaaccttacccaaatgcgtatcttcgtgatccattttaagcaagctgttgtctttcattcaattcacctccgtaaaaattatgagcccattacatcatatgtttctaaaaatttcgtattaaactctccgctcacaaatgtttcgtgttcaagcagttttaaatggaaagggattgttgtctcaatgccttcgatgacgaattcgctcaatgcgcgcttcatgcgggcaatcgcttcatccctcgtttttccgtatgtgattacctttgcaatcatgctgtcatagtacggtgggatggaatagccagggtacgcagctgaatcgacacggacaccaagaccgccaggaggcaggtacattttaatttcaccaggtgacggcatgaaatttttacttgggttttctgcgttgattcggcattcgatggcccagccttcaaattcaacatcttcttgcttgaggctcagttccattcctgatgccactttgatttgttccttgatcaggtcagttcccgtcaccatttctgtgactgggtgctccacctgaattctcgtgttcatttccatgaagtaatagcgctgttcattgtagtcatagataaattcaactgttccagcacctgtatagccaaccgcttttgcagcctttaccgctgcatctcccatttgctccctgatttctgaatcaagggcaggagatggtgattcttccaaaagcttttgcaggcgtctttggatcgagcagtcgcgttcgcccaaatggatcgtatttccgtagttatcagcaagcacttggatctcaacgtggcgaaaatcttctatgtatttttcgatgtatacacctggattcccaaatgcagttgccgcttcctgctgtgtaatcttaatgccattaatcagttcctcttcagtgcgggcaaccctaattccttttccgcctccgcctgcggtggcttttataattacaggatacccaatttcattagcaagcgaaaccgcttcttccacattttctataattccctgtgaacccggtacgattggcacgccggcctgtttcatcgtttcccgcgcaacgtcttttgttcccatttttgaaatggcgtcagcgctcgggccgacaaacgtgacattcacttcttcacataattcagcgaaatcagcattttcagctaaaaatccgtatcccggatgaatggcgtccgtgccagtcagctttgcaacactcacaatatttgtaacgtttaaatagctgtcttttgatgctttcggtccgatacaaaaagcttcatcggccatttgaacatgaagggcatctttatcagcttctgaataaacagcgacagtctcaattccgagctctctgcaggctctgatgattctgacagcaatttctcctctgttggcgatcaatagctttttaatcatgttcagtctccttactccgcttttacaagaaatagaggttgtccgtattcgaccagctggccgttttctactaatacttcaacgatttcgcctttcacttctgcttcgatttcgttgaaaagcttcatcgcttctacaatgcagacaactgtgttttcatttacttttgaaccggctgttacatacgggccagcttccggtgatgaagaagcataaaatgttcctaccattggtgaagtgattttatgcagattctcatcttgctttggtgcttcttgggcaggtgccgctgcttgctgcgcttgcggctgaactgcctgcggagcctgtgcttgtacaggtgctgccggtgcctgctgcatgacttgaaccgtgcctgcttcgtgttttttcagttttaaggatacaccttcattttcatatacgaattcgtcaattgtagactcgtcaattgctttaatcagctcgtggatttctttgatatttaacattcaatcgcactcctatgtatgaaatttctttttttataggttactgctaaaagtacatactatgttcatcttacaggagcggacttttgaattcaactctaatatgacagcaacgcaaaaagcccgcttgtttagcgggcttttttccctcattcttatttagagggttcaaatgtgacagcgacatctttcattgttttgatttcttttgccacaaggtctataatggctgtcgccttcgatttagagtgtttgtctgatttgactgtaatattgattttatctccttcagcattaacaagcgcatcctcgtaaccttgtgttttaatcagcgtttccagctgtttttctgttccttccacttcactgagagccgtcattttatcgtatgcttcgcttttctccttggctgttgcatcatcgcttgacacaatggcattcagctcttctctttctttgcttctggcatcttctaaatcaagacggtacgttgtaaacaaatcatcatcggctgtttccgtaacaacagttcctttttcactggcttcagcggatgtttccttgtctgctgatgaatctttcgttccctttgttccatcttcttttcctttttcagtttctgtaccgcttttttccttcgtgtcttgcttggcaggcgctttttcagttgcgacctctccgctgtcagacgcgcttttttcactttgcatctgcacggcgtttttgctttccggcgacatgatatagtagacgcttaacaccacgacaagactgagcattgttaatagccaaacggtttgttttttaagcatttatgaatcctcctttatttttttaggggcaaccgcaacccggtggcttggaacatccaggacccgtgtcaccgcttcgataatggtttgttttatttgaacgttgtccactccttgagcaacaacgagtacaccgcgtatatcaggttttttcgtttggacgacgacaggtgtttctttatcgccgtttttgatcatgacgatttcttcctccgatgtttggtctgtaacgcttcttgttccgccttctttgtcagtttcttcggtggttgtatttttgtttgatttgtttttttcgtatactttcagcgacgttgcatctacattcacgacaaccgagacatcgtccacaccaatgattgtttcaagaatttctttcagctgattttcgtattctttttcatagtcatcgatcgagtctttaggtttatcagattttgaggctttaaacacttcagctgttttctctttgctgcccgcggaatgttgcgatgatacggccgttatcgttttggcgttttctgttttctcaggtgaagaaaacagctggctgacaagcataaaggaaactccgagaacaaaaacgaatagaaagtaatgatatttggtcagcttcggcttttcgccgtccttcgtttgtcccggaagaaactgctttttcaatacattccataatccgtttttattcattgccgacactctccccgccttccatatgaaccgtaattttctcacttccgatttcccaaatgtccgcgagctgcgtttgtatctgtttggcttctttttgttcggctgcttctttcgttacgtatgcatgatctgtatcaatgtggaccggcgcgaccgtttggaccgttttttcagaagacggggccatatacacgctgattgttttaatatcctcttctgaatctaccttttctcctgccgtgagtttgatgcggcctactttatattcatcatgactgaatctctcctccgctttcttttttagttggacagccatttcttctagaatatatgcgcgctgggaagcttgtatttctattttttttgaattgatttgattttttatgtcggcagactctgactgcccgttttttgtgagatattcaaagatgatttcggggtctgtcttgaaaagtttaaaaatcggcgtaagcatgacgacaatcaagagcaggctgactaccatttttgcgtacttttgcatgctggagctcggcagcagcatatcaatcacaattgcaaataggataaacaacacgatggtggtaagccattccgttaaaaaactcattcgcctgcctccttcatttcatcatcatcgtgaggtttccggctgtgattatgacagtaaggcttaaaaaaaacatgagagacacaatagcgagagctgcaaaaatataaatgacgcttttgctgatgacgtcgaggcaggtgatgacgggcccgcctcctagcggctgaagaatcgcggctgccagcttataaataaaagcgagggaaagcactttgattgccggaaatgccgcgatacagatcaaaatagcaacaccgagaatccctaccgtatttttcagcagtaaagaggcgctgattactgtatctgttgcgtctgtaaacattcggccaagcacaggaataaaatttccggttataaatttagccgtcctgagcgtaatgccgtctgtcactgcagctgaggctccctgaacagagatgacgccgagaaagatggtaagaaaaacagccagcgctccgatagcgatatttctgagcaggttagccagctgcgttactttgtattgttcggtcatggtgctgacaatgctcagaatcgctgataagaaaatcagcggcatgacgatattctgaatcaagagaccgctcgtgttcatcaggaagaggataacaggatgaaagaaggcagcagatacagctccgcctgaggaagccaaaagcgccaagaggagcggaatgagcgccaggataaagctggtcatcgtctgaatcgcctcagttgcatagttaattgccacatgaaagctattaagcgcaaggataatcagcaccatgtacacaattgagtaagcgaccttactgacggtgctttgctgaaaagcattttgcagaagctgcagaatgacgcaaaaaatcgtgagcaaaatcaatgtgcccagcagctttccgttggcaagcacttcatgaaacaaataagaaaagagagctttcagccattcttgcggtgagaatgatttatcgccattgataaactccattaagctgcctttttggctttccggcagcagtccgccgtattctgtcataatgtcattccaaaattccccgatcttatctgtttcaagcgaggctgctgtcctttccgctaattgctcagctgtttcagcatggtcttccgtttgttctgcattaccagctgcttgtacaatttctgcacggcctgctatgatcagcacggccaaaagcaaaacccattgaaagcgcttcaatctaccgcctcctttcggttatgacatagaaggtataagtccgagaatcgtttcgataatgacggttaaaataggcacagccataacgagaattaaaatttttcccgccaattctattttcgaggcgatggccccttggccggcatcttttgtgagctgcgccccgaattcagcaatataggcgattccgataatctttaaaatggtttcaacatagaccatgttgacatttgcattaatcgcaattttttctatcattcgaataatgtcgtagatttggtctactaaataaagaaaaatggcacatccggcaaaaacgacgattaaaaacgcaaaagtcggcttttgttcttttacaattaaagaaaggaaggtggcgatcagccctaaacctacaatttgaacaatgtcaatctgcaagcccccctatccttggaataaaaacacagcttttatctttttaaataggtcatctacaatcgtggcgaccataaataaaatatagataaaacctaacagcgtcacccactgagcgtattctttcttgcccatctgatccaatatcgtgtgtaaaaaagcgaccacgattcctactccggcaatttgaaatatgacattcacgtctactcccattttatttttgctcccctcacgtttacatcaatagaagaatgagtaacaagcccgctaaaaagcccaaactttttatcattttttcatttttcgcttgcgcctgctcagcatccgcttcagaggcttccaaatgtgtcagcgccagcttgatgtgcttttgctgagagattcgatcatgaatcccgagcgtctcgccaaactgcttcagcacttcgtattcgctttttttcaaagacagggtgtcccataccttctttaagctttgctcccacgccgttttcgcggaatcacttcccttgtccagctgatcactgaatgcggaaaaaagagctgaaacaggctgtgcgagctgtttggcaatctgctgtgaagcagtatgaagcggtgtatggccgtacatgatttcagcctcgagggattgaagcgccgcacgcagctggcggatttgccgcggccgttctgtataaatcttcgccatctcaaaacctgtccatgttgtcgctaccacaataaatacagcgcccagcagcttcagcatgttttcacgcccgtcgtcctagacagcacatttccgtctttgtcataaatttggctcactgtgcccggcccttttgctcttgataattccaaatagcggtcaaaggctctttcttcccacaaacgcttcaatgaaggccgcttcatcaggtcggatatgctccagccatgcgccgatacaattactgaaacaccagcatgcagtgcctccagaagtgcatctgtatcttccatacgcccgatttcatcgacaatcatcacctcagggctcatggatcgaatcatcatcatcagcccttcagcttttggacaggcgtctaacacgtcaattctctgaccaaattgatgttgcggaatgccgcgaagacatccggcaatttctgaccgttcatcgacgattcctgtctttacgggcagcatgggttttttgccggtgcttgagagcctcgcaaggtcccggagaagtgttgttttgccggtttggggcggtccgataatcagcgtattcagccagctgtcttgatataagtatggaagcagcggctccgcaatccccagcttttcccgggcaattcgtatattaaaagatgcgatgtcacggaggcctttcacacctccgttttccgtaatgactctgcccgccagtccgactctgtggccgcctctgatcgtgacataccctttcttcagctcttcttcaagagtatacatactatagttgctaagccggctcaggatcagatgggcatcctctgccgtgcccgcataggacaaataaacaggttgtcctcttcgaatcaattcaacagggcggttgatccgaattctgacttcttcgatttccagccattgttgttccggtatttcagaaagggcgtttttcatggattcggggagaacctcagcgatttcattcaacagagcctcctcctttctaccgattggcttctttaaaatgtatgatgtgaggcagactttatgacaagcctctctttatttatgaacacccgccaaaatcaaaacaacacccgtaaaaatcagaatcagctttgcatacgaaagctgcccggcaatttggtagattccgacagtcatcgtaatgataaaaatcaacggaccgacaatagcgagaatgctgttaaccacaaccgccttccggacatcgttggtcacaagcatgacaattgctgccgtcagctcaatcatagaggataaaactcgtaatcccgccattgttaaaacagtagaattgatatttccaagtaaaaatttcatagcactctcccaacctcccatttttttatatgatatgctctagcttggtgaagtagtcttgtcattttcgtataaaagaaagattctgtttttgggcacaaaaaaagcctgctcccatttgggaacagacttctttttttctttctatgctcttgaaacgtaagaaccgtctgatgtattgacaacaagtgtgtcgccttcattcacaaagaacggcacgtttacaacaagcccggtttcagttttcgcaggttttgtaccgcctgacgctgtatcacctttaataccaggttcagtttcaacaactttcagctcaactgtgtttggaagttcgataccaagtgtttcatcctggtacatcatgatatgcacagacatgttttctagcaggtattttaattcttcttcgatttgagttgcgctcagttcaagctgctcataagaagaagtatccataaatacgtgctgatctccgtttgcatatagatattgcattgttttggtttcgatttgcgctttcgctactttttcaccagcgcggaatgttttttcctgaatggcgccagtgcgaaggttgcggagtttagagcggacaaatgccgcaccttttccaggttttacgtgctggaagtcaacgacgcgccaaatgccgccatctacttcaattgttaatcctgtacggaaatcgttaactgaaatcatgtttaatgtcctcctatattccaatcacaaaataataagttcttttggggaatgggtgattgtccggttgccgttttctgtaatcacgatgtcatcttcaatgcggacaccgcctgtttctggtatgtaaatgcccggctccactgtgaccaccatacccggttcaaggatagctgaagatctgacggataatcccggagattcatgaacttccatgccgagcccgtgcccggttgaatggccgaaatagtcaccgtagccttttacagcaatatgatcccttgtgagggcgtcagcctcttttcctgtcattcccggcttaatatgtgcgacgccaagcgcctgagcatcaaatacaacctgatagatctccttcaattgatcactgggctgacctacagcgaccgtccgggtaatatcagaacaatatcctttataataagcgccaaaatcaagcgtaacaaggtctccgctttcaatcagtttgtcactggccacaccgtgcggaaggcttgaacgaaggcctgaggcgacaatcatatcaaaagaagagctgtctgctccctggcttctcatataaaactccagctcattggcaacagcgatttcagaaataccgggtttcataaacgtcaagatatgtctgaaggcatcatctgcaatcttcgcagcttcctctaatatcttaatctcttcactagacttaatcaagcgcaacttttccacggattcagccacaggcactaattcggcatcactgataacggcgctgtatgaagcgtaagtgccatatgtcatgctgttctgttcaaagccgagacgcttgatgccaaacgattcaacagtgtcggcagtggtctgaatcaagctgccaccatgttcaatgatctcaaaaccctttacctgaaccttcgcctgctcagtataacgaaaatccgtaataaacgctgctttgtcacccgatataacagccaaacccgccgaacctgtaaaccctgtcatatagcgtacattcgtgctgcttgtaatcagcatgccgtcaattcccagctgtccaaacaggtttcttaatttctctagcttcatcttgattctcccccttgctggcttaataagtagcgaacagcaagcttgtagccttcagctccaagaccgacaatctgccctttcgcaacaggagcgataaccgactgatgcctgaattcttccctggcgtataagtttgataaatgcacctctaccacaggaagactgatgcttgaaacagcatccctgatcgcatagctgtaatgactcagggcgccggggttcagaacaatcccgctgtattgctcctcagcctcatgtatcgcatctatcaaatcaccttcgtgattagactggaagaaagtgagctggatatgtaaggcttcagcaaactgaaaaagatctgtttcaatatcggtcagtgtctggcggccgaatacttcaggctcacgactcccaagccggttaacattcggtccgttcaaaatcaaaaaatgaggcacataatctctcctttttgcgagggtttctcatgtaaaaaatgttcacttctcgtgaacattttatcatactggaaaaggattatacactattctctatgcattcccagcgcacgtgcaagcttttccgaattcagctcattgtattcaaatgaaatggaatacccgacaaacagcccgtaaagcaaataaatgcaaatggtcgtaataattgtatctgatgtcagttcggtcaccgtgcgcacatctggaaaaatcggattaaaaacaaaaaacacgagcagccaaagcaccaagccgtataaaatacccggccacattgtttttaaacgtttcaatagaagaaaataaagaaatgctgcgccaattgaaattactccaatcaaaatgatgctgattaccgttcccagcccatgttttttccactctccgagcacaaacggctgcaatatcatattcgggctgatttcggaaaaatgaaacaaatatgcgatataagcaacgaaactccaaagtacgcctccgcaaaaacctgttgccgccaccctgccggccattgaaacaggcggcttttgcttctcattcaattcttcattttgttctgtatctttttcgcttgtcatcatggcacctccagttaaagtgtgcccaaaaaaagaaatgtcaataaaaaagctcacactttttgacagctgcgagtaaaatttgaaaataacgggtataatgcatgtagaaaaagcaaggctatggcaattttttcagcttgtcaatctagaggtttagcgctgtttcctgtacaatagagtgaaaggaaatggttagcaatcctaaagaaataggcaggttgataatatgtcaaaacataaagttccgcccgcttacggcgggcaggctgttgtggaaggcgttatgtttggcggaaagcatcattacgttacagccatcagaagaacggatggaagcattgacttttttaagcttccacgcaaacacaacccgaaactgaacatcgtgaaaaagatcccgtttttacgggggatcgcggccattatcgaagcgagtgcaaacggcacaaagcatttgaatttttcaagcgaacgttacgggctcgatccatctgaagacgagacacttgagcaggaagaaaaaaaatcctccgggctgtctatgtatctcagcctcgcagttataggcgtcctatcatttttgttcagtaaattcgtatttacattggttccagttttcttagctgaactgacaaggccgattttttcctcggacacggcgcaaatcgcggttgaaagcctgtttaagttgattttgctgctcggttacatctattttttgtccatgacaccgcttattaaaagagtgtttcaatatcatggagccgaacataaagtcataaactgttatgaacagaatttgccaattactgtggagaacgtccaaaaccaatctcggcttcattaccgctgcggatcaagctttattttatttacgattattgtcggcatgtttgtttatttactcgttccgacagatccgctttggctgcgtgttatagatcgtgtcgcactgataccggtcgtgcttggtatatcctttgaagttctgcagctgaccaacaaagtgcgtgacattcccggtctgaaattacttgggtacccgggactgtggcttcagctgttaaccacaaaggaacctaaggatgaacaggttgaagttgccatcgaaagctttaacgaacttctcagactcgaagcattgtctgagcaaaatcagaagccttctcacaacgtcatctaaaatccgttgccctgctattactttcggaggtggacagttatgaatcatcgtgtacaacctattattgctgtattaattgcgctgggagcgttcggtttcctctatgtgctggtaaccaatcccggagaaatggcaaaaatggcggtaaccgtcatcgtggcaggtatcattatttattttattgtgaaatatgtaatgaatcgaaatgcgggcagcgaaggagcagccttcaaaaaagcggcgaaacaatcgcggcgccggatgaaagaacataaagcaaaacaccgcgccggacataagggacgtgtcagccacctgcgaagcgttccgagcgccagcaagcctaagccgatgattctcaagaaaaaaagccagactcagctgactgttatagaagggaaaaaaaataaaaagaaaaacagagcgcttttttaataggtccactgctttaaaaacagctctgtccgtcttttacctagctcaatcagggctagttttttttgttgtgttaaatgaaaatcagttgccattacgccatcaaccgggagaaaaatgatattttgttcatagcgtgatgcaatgtgccttgcgtcatgggcatccttcatcgtttcaaacagggcgccgaacagttcaaaagcgttgcggatattttttttcggacgctctctttcacgcggcgcaagcgtcacaccgatcacagggcgctttctttcctttgaaaacagccagatggggaaattgcttaacacacctccgtcgacaaccgtggcggtgcctgtgtccgtttttaattttatcggttcaaaaaaatacggaatgctgcagctcattctgaccgctctggcaaccgggaacatatcgggatttaacccgtaacgggccaaatcgtccggcaaaacaatcatggtgccgtttgtcagatcagaagcaataaggcgcagagaccctttctgcaaatcgccgaaaacccttatgcctttcgctcttaacagatcagcaatccattcttctatcgtatcgcctttgtataagccaagacgccagtagatggacacccactggagcatttttaaggggagaaaagagtacctttgatccagcaatttctctccgtccacttcttcaattaaagcgtggatttccttactggtgtaacctgacgcaatgaaagcggcaataatggcgcccgcgcttgtacccgcaacccttttaaagcggaagcctttttcctcaagcgcttcataagcgcctgcaagcgcaatgccttttactcctccgccggaaaacacaccgtcaatatacatctcattccctccccctccatccgatcgtttattaccattttaagaaaacacgcgcagaaatagaccaactaatgacgggtggcgtcagcgtatcaaaaaagacggcctccttcgagaccgcctttttactgattatgatgttctgttttcttttggattgatttcagatcttttttacgggcatcatcttcttcaaaatattgaacaagatccccgatgcgatcaatactgttccagcttaaatgatgttcgattccttcgacatcgttatatattttctcttcatcaacaccaatgattcttaaaaactgctcaagcaattcatgtctgtataccagccgtttgcctatttttttccctttagacgttaacacgagaccgcgatatttttcataaattaaatattcgtctttatctagtttttgaaccatttttgttacagaggagggatggactgccaatgcttccgcgatatcggaaactcgtgcatatcctttttcttcaatcagcatataaatctgttcaatataatcttccatacttggtgttgtcatcgaaaccctcccaaaaagcaccttaactttataaaccattacaagtttacactaatgaacttgaaaaaacaaggatgctccgcgggtcaaaagccctgtttaccgcttataattccattcatctgaagcgtactttgtttcagccaagtgatgaacaaaatcaagctcttcctgagaaagttcatatggctccaaatgaatgttaagacctgtttcaaatccttctttaaaggctttacgagcctcatccatcgtcacccgcttttcggtgagttcattaatggcaaccgctttgtttttgaaattgcgctgcatccgctctcttactctttcacttggatataagaacagatcgaacagcttgtcctcatctaaatcaagaagaatggagccatgctgaagaatcacacctttttgtctcgtttgcgcgcttcccgccaccttgcgcccctcaaccactagttcataccacgaaggcgcgtcaaaacaaacagatgaccgcggattttttaagctttctttttctttttcagttctcgggatggcaaagtaagcgtccagaccgagatttctaaagccttgaagtatgccttctgaaataacccggtaagcctcagtaacagtcgccggcatctcggggtgctcttccgaaacaattacgctgtatgtcagttcctgatcgtgcagcacacctctcccgccggtcgggcgtctgacgaatccgagattatatttatgtactgcttcaaaattgatttcctttttaatattttgaaaataccctacagaaagtgtcgccggattccagccgtaaaaacggataaccggggggattttcttttcgctgtgccaatataaaagcgcttcatcaagcgccatattgaatgcaggacttgcattgcctgagtctataaaccgccaagtttctttttgcattttaagaccttccttaccgttttaatagaatcagtttatcaaactgtcgggaaaatgaaaaatattttagttccattatagatgacaatcacgctgtgctttactataatagtatttgtcgaaaacggctctatgaccttgttttatgaagcagggttttgattttatatgctaaaggagtagaatcacattgtctaatatgatcgttttgattatttttgctgcgtttatcatctatatgattgcttcatatgtctatcagcagcgaattatgaaaacacttaccgaagaagaattccgcgcgggttaccgcaaagcgcagcttattgacgttcgtgagccaaatgagtttgagggcggacatattttaggcgcccgcaacatcccgctttcccagctgaaacagagaaaaaatgagatccgtacggacaagcctgtttacctgtactgccaaaacagtgtccgcagcggacgcgcggcacaaaccctgcgcaaaaacggctgcactgagatttacaacctaaaaggcggctttaaaaaatggggcggaaagattaaagcgaagaaataaagcaaacagctgtctggtagacagctgtttttatttatctttctaccgcctcgtatctgagcaccgggtgtctcgccgcttttgtttcatccattctttttacaatcgttgtatgcggggcctcctgaacaagttccggattctcctccgcttcttttgcgatttgaatcatagcatcaataaacgcgtccagtgtttcctttgattcggtctctgtcggctcgatcatgatgcattcttcaacattaagcgggaaataaatcgtcggcggatgatagccgaaatcaagcagccgttttgcaatatcaagcgtacgcactcccagctttttctgccgcttccctgataatacaaattcatgcttgcaatggcggtcaaacggaagatcgtaataaggcgcgagttttctcatcatataattggcgtttaacactgcgttctcagtaacagcctttaatccgtcaggccccatggagcgaatatacgtatacgctctcacattaatgccaaagttgccgtaatacggcttcacacggccgatcgcatgagggcggtcataatcaaacgtaaagcgcccttcttttttgactaaaactggctttggcaaataaggaatcagatcttgttttacgccgacagggcctgagccggggcctccgccgccatgagggcctgtgaatgttttatgcaggttgaggtgcaccacgtcaaatcccatatcaccaggtctcgccttgcttaaaacggcatttaaattagcgccgtcataatacagtttcccccccgcttggtgtacaatttccgccatctctgtaatctgctcctcaaacaagccgagcgtgttcggattcgtcagcataagagctgcagtttcttcattcactgctctttttaaatcctctaaatcaacaagccctttttcattcgatttcaccgtaacggtttcaaagcctgctactgttgctgatgcaggattcgtcccatgcgcggaatcagggacaatgaccttcgtccgcttgaaatccccgcgagcttcatgataggcacggatcatcatcagccccgtccattcgccgtgcgctccggcagcaggctgaagcgtaacctcatccattcccgttatttcttcaaggtgtttgcttaaatcatataaaagctctaatgcgccttgcaccgtgtcttcatcctgaagaggatgaatcgcagcaaaaccaggaatacgtgcgattttttcattgattttcggattatatttcatcgtgcaagaaccaagaggataaaaaccggaatccaccccgtgattgcgtttggacagcgctgtataatggcgcatgatgtccagctctgaaacctccggcagcgctgcgtcttcgtcacgaatataggtgtctgacaagaggtcccccaattcgatttccggtacatcgagctccggcagactatagccgattcggccttctcttgaaagttcaaaaataagtgcctggtcctgattactcatggcgatcccccaattcctgaatgagtgcgtcaatttcttcttttgttctcagctccgttacagcaatcagcatatggcagtccagctccggatacgtcaacccaagatcatatccgccaatcatgccttttgccagcaaacgcttgttcacagctctcaccggctcatccagtttgatgacaaattcattaaacatcggcccgtcaaacataacagtaaggcctgctttttttgcttcttgctttgcatagttggcttttaagagattttggcgggctatatcttttacgccgttttttccgagagcagtcatggccactgatgctgcaagcgcatttaaagcttggttcgagcatatatttgatgttgctttatcccggcggatatgctgctccctggcttgcagggtaagcacaaagcctctttttccgttttcgtcttccgtttgtccgacgagacggcccggcacctttctcattaattttttagtaacggcaaaaaagccgcaatgcgggccgccgtatgctgaaggaatgccgaaaggctgcgcatcaccgacgacgatatcagactgaaacttgcccggcggagtgagaagacctagcgccagcgggttagctgaaacaataaacatggatttcccttgatgagcgataggctcaatatcctttagcggctcgatcctgccgaaaaaattcgggtactgaacgatcactgcggctgtgttctcgcaaacggtttggcgcaatgcatcaagatccgtaacgccatccgcagcgggtacttcaacaacatcaatatactgaccttttgcgtacgttttcagcacctctcgcgattcaggatgcacggtttttgacacaacaatttttttctttttcgtgtggcctgaagcaagcattgctgcttctgccaaggctgttccgccgtcatacatcgaggagttggcgatatccatgcctgtcagttcacagatcatcgtttggaattcaaaaatagcctggagctctccttgtgaaatctctggctgataaggcgtatatgcggtataaaactcagagcgcgaaatgacatgatccacaatgacaggctgatagtggtcatatacacccgctcctaagaaagaagcgtattgtacggtatcacgatttttagaggccagctttgtcagttctcttgttaattctgtttctgatttcgcttttttgatttgatactcttttttatatttgacgttttccggtatatcagcaaataaatcatcgatgctgcttacgccgatagtagcaagcatctcctgtttatccttttctgttgcgggcaaataacggtgcttcatgtgttgtctcctctctccaagaaaaaatattagcgtttataaaatggtgttttgacaacctttgctttcactaattttttgcgaatctctacatctacaacagtcccgatctcacttgtttccgaatcaattaaggcaaggccgacgtttttccctaatgtcggtgactgcgtgccggttgtcacctttccgacagacttgccattttggaaaacctcatatccgtgccgcggtatccctttttcaatcatttcgagaccgacaagtttgcgcttcgctccgttttctttttgttcactcaatactgacttaccgaaaaagtcagactccttattgtgctttacagcaaagcctatacctgcttcaatcggtgtaatatcccgggtcagctcctgaccgtagagcgggagcttcgcttcaaaccggagtgtatcacgtgcaccaagaccgcatggaatcaatccgtatgcatcccctgcatcgatgatttttttccaaatatgcatagcatcatcactgcggcagtaaatttcatacccgtcttctcccgtatagccagtgcgtgaaataagtgctttgcggccgctgatatcggcttcatcaataaacgcaaacggctttaatgcagacacatctgcatctgtcagattttttaagaccgcttctgctttcggtccctgtacagccaagagcgcgatttgatctgactggttgtcaatctgtacatcacctgctgcatgttctttcatccaagccaagtctttatctatattagaagcattaatgacaagcagatagcggttctcttctttttgatagataagcaaatcatcgacggttccgccatccgggtaacacatcgctgtatattgagcacggcctggcgttaacgcggaaacatcatttgtcatcaatctttgcaaaaaagacagactgtcgttccctgacacttcgacttctcccatatgagatacatcaaacaaaccggctgcagttcggacagcctcgtgttctttttttatagaagaaaattgaacaggaagctcccagcctccaaaatcaatcgtttttcctccatattccttatacaggtcaaataacggcgttctgttcagcatctaattcctcccctttatcaacggcgcagctaaaaacatacaaaaaaggacagagaaacacctcatgtaaaatgaaggttctctgtcctggcacctgaaagtttactttgcatacgcaaagacgtcccctttggtggtttgcgcatccgcacaaacactctccagagttgcgtcgagcaagagttcttttgcctgagagattcactccgcagtttgctccttcggcgcctgtatcccgaggttttcggtcaggtctctccccttgctgtcattcgctcatattttcatgctgttatggacatactatagcaatatcttacatcaaatacatactcatatcctaccatcatcactatatgctgggcaacagcaatttgggcagatttttcttatattattcatcttaagaatcgaagaattagaaaggcggtttcaaagcaatgaatacagaaatgatctacgatgcaaaatggcctgaagaatttgctgaaagactgaaaaacgatggcccttgggcaaactgggaactgtacaagctctctgcagaaatccagaaaacattagcaattccagattttgaaggcttacgggctcctttatatctgccttcctttacgccgctcccccaccagcttgaagtggcgcaaaaagtggttgaaaaaatgaacgggaaagcgattttagcagatgaggttggtctcgggaaaacggtggaagccggtttaattttaaaagaatatatgattcgcggattagcaaaaaaaattttgatccttgtgcccgcttcccttgtgtcacagtgggtcaaagagcttcaggaaaaatttttgattccggctgttgaacaaaagaaaagctatgtgtgggagcaatgcgatattgtcgtctcatcaatagacaccgcgaagcgctcgccccatcgagaaatcgttctgtctatcccatatgatcttgtcattattgatgaggcacacaaactgaaaaatagcaaaacgaagaactatgaatttgtccggaatctcgtaaaaaaatattgcctgcttcttaccgcgacgccaatccagaaccgtatcgaagagattttcaatttggtgtccttattaaaacccggccatttaggcagtcagaatcactttcaggaggagttcgccaagaagaaatccagtttagaagcgcatgaacatttaaaagatcttgtgaataaagtcatgatccgtaacaggcggcatgatacagggctgaattggaaacagcgccatgttgaaacagtgccgattcaattttctccatcagagcaggcgctttatgatgaaatttctcgcttgaaggaaagtatcaataaaccagccagcatgttctcgattatgaccttgcaaagagaatgctgttcgagcagagaagcggtgtatatgacgctgaaaaagatgctagatcaaaaagagaaacaagcacctgccattgatgaggatacgatttcagttttaatagatcgcatcaatcaagtgacacaaaactctaaagcgcttcaagtcgttgatttgatcaaaaaaatcgacgataaggtcatcatttttacagaataccgtgcaacccagatttatttgcagtggtttcttcagcaaaacggcatcagttctgtgccgtttagaggcggatttaaacgtgggaaaaaagactggatgaaggatcttttccgcgggaaaatccaagtccttattgcaactgaagcaggcggtgagggaattaacctgcaattttgcaatcatatgatcaactatgacctgccatggaacccgatgcgacttgagcaaagaatcggaagaattcacagactcgggcaggagcgtgacgtgcatatttataacatggcgacaaaacatacggtggaagagcatattctaaagcttttatatgaaaaaattcatttgtttgaaaaagtggtcggtgaacttgatgatattttaacgaaaattcaagtgaacaattttgaagagcatctgcatgacattttgtatcactcagcaacagaagaagaaatgaaaataaaaatggataacttaacctcatttttgtcttataaaaaacagcagcctgctgaaaaaagaggatcttagcctgtaaggaggttttattagtgagacagcaagaggttcacgattttctgctgcgtttttttcaagcaaacagctgccaaatcgtcgatcaaggcttaggctatatgacagtgcagcttacagttgaaatggacaaacaaatcatgaaccgccctttctactggcattggcgcgagaagacaggcggtgatccgaatccaatgaaaatcacttttattacagataaagaaaatgcgccaaaagacctagatggtgaatttatatattttggggccccgcgtctttttcaaatatttaaagctgttaaacaaaatgggagatttaccagaatgtatgagaaaattgaatcagccggagctaaagtcccacttcagccttggcttggtataaatgtcacgatttcataccagtccgacatgaaaaaggataagttattgtcactaggtcttcacctagtctctggaacgataattgaagattttcaaagcaagctgacccagttttcactgacgtctcaaatatgtgactattgcttcaccatttcacctatgatcaaaccagaaagcggacttaagcgtatggaaaactatatttccaaatccgctatgcaggagccatccgactgggcggaacaggcggttaacaggtggaagaatgatatgacattgcttgataagttttacgagcatatagaagaaaaaccagaagaataccatctagaaaaacaggcgctgaaaaccttgtatcaaccaaagatatcagttgaaattgaaaatggcggattgttttatctgcaaaataatatttcaagctaacttttttaccattcgacatcattctcgttttttttgagaaaatacgattataataaaggtatattggaaaaaaattctggtgatttaatggcaaatgacttccagagactaatgaagcatacaataagtcatggccggactggctgaaatacataaacaagtattttaggaggagaaactgcatgaagaatgcaaaacaagagcactttgaattggatcaagaatgggttgaattaatggtggaagccaaagaggcaaatatcagcccggaagaaatacgaaaatatttacttttaaacaaaaagtctgctcatcctggtccggcagccagaagtcataccgtaaatcctttctgaatgtgctataatatcacaaggaaggtgatgacattgattggccagcgtattaaacaataccgtaaagaaaaaggctactcactatcagaactagctgaaaaagctggggtagcgaagtcttatttaagctcaatagaacgaaatctacaaacgaacccctccattcaatttctcgaaaaagtctccgctgttctggacgtctcggttcatactttgctcgatgagaaacatgaaaccgaatacgatggtcaattagatagtgaatgggagaaattggttcgcgatgcgatgacatccggggtatcgaaaaaacaatttcgtgaatttttagattatcaaaaatggagaaaatcccaaaaagaggagtagtgcctgagcagaggcactaactcctcttttgtcaataaccatcgagacggcccagtatatgaatactgggccgtctctttttatggctgttattaatttttatcctcgctgtgcgctttttcattttctttcacataaccgtctttatcagtatggtcctttttgattgtcaagccgttccactgtgtagcttcgaacgagaattgaagcttaatggagttgccttgatatttattttgaaccataagcccgttttcatcttttgttttatcatctttgaattggatttccatttgaacctgatcgaagtcagttggtgtttttggaacaccatcatattcaggagcggttttaccgtcaattgttgctacattgactttaccgcttgcatttaagaatttagggtcaatttgttttttgattttttcagtagccgctgcatcatttttagcagacatcaaatacaagtctttaaggttcgcatcatctaaaataatgtttttcgggtaaccattgccgccctcttttccaactgtcaacaatgtcacttcaaactggctgaggaaatcttctggagatgtattgctgccgccgtttgctttaaaatctccataattaagcgccattaaaacttctttgatcgcaagtgatccgttattttcaaattggaaatcctttgtcaacttatctcccggctttagatttgataagttcacactcgctgaattctctttagcagataaatcaagcgtacctgatgcaaaagtagcatcctttgatttaatgtcgttaaatgctgcccatgttcctcctccaactaaagctaatcctagtgctgcagaagcaactcctaaactcaatttctttttcatacccatggtaaactccccttttattgaatgattttatatcgaaacctgttgccaggtttacaactgaagttaagtagacatggtgctgtcctttgtatctgtttccaaggcttttgtctttctttcaatttctctaatggcgctgctgatcgtcacaaaagcgtacactaacagcatcacgccgggaacaatcaataatacagccgttccaatcggctggctggcaaaatgaagcatatagcctgcatatggaagctgaaaacctgtgtattgtgcgcgaacattttcgtccgatacaggcgctgaatcagctgctgcattattatcaccttttgttttaaataacaaatggtctccttgctttgttatgtcaacaattctgtgggtgacagccgtatttgcatcctgcataaatgtaataacgtcacctttttgaagctctttcacatcagcgatttcttttaccaatattaaggaacctgtattgaactccggctccatcgaacctgacagaactgatttcagcgtatacccaaacaccgccggctctcccccggatgaacgtgttgaaatcacgacaagtgtcagcacaataataagagtaaagatgatcacgtataaaatattactgatcagcttcattgcttttttcatcctcttccccgctttccttctggtctgattgagtttcattttctttggttacagcttcttgagatgtttcttctttcattgttttttcctgtatatccttttgtgttgtttcattctcctttttgacgtccgactttgtttcttttttagggactgtcggtttttcatcgcattttgcaagcgtcataggctcggaccactcaaatgtactgccgtttgccgggtagcctgccggtttatatactttaaatgcataaatgccgggtttcatttttttcttcgtctcaattttataaagtgaatcgccgatttgattggagacaaatcctttttcgatcacgttcccatcctttaacggtttgcgggcattttcaagcttatgaagctcccacttccactttgatttcttaagtttctcacctgtattttcgagcacagcaaataaggcgaaaggtgagcatacagtgcctttcgtatccgtttgatctgatatgtgcaaatcactttgatcccagcgtttatcataatggcagtttttatctgtatgctgaaagtctttacacgtttgaagtgagacatcaaatgtttcaatatcatgaaaagcagcgcttgtatcatcggaaaattgtaagcatattgcggcagtcagactgaaaatgactgaaagctgaaagataagcagaactttcagtttcgtcttcgccttttgctgattgtgaaacaatcgaaacatatcttacctcctgtaaaacactgtaacttgatatgacaatcgttctctttaaagaactccacaaatagagtataatcaacgatttatagatttaaaaacaccgaaatcgctcatttcgttcgtttaaaagaatgttttcatcatattacaaagtcttgctcagtattgctcattttttcaattttttagaaatttttgggattgttatgtgagaatttaaatgcatatcccattattatttggtaataataaacaaagaaagggtgacagcatgatgatcaaacaatatgtgatttgtctatctcttctcgtctttggcaccacagccgctcacgcagaagaaacaccgcttgtaaccgcccgccacatgtccaaatgggaagagattgctgtaaaagaagcaaaaaaaaggtacccgctcgcacaggtactgttcaaacaaaaagtatgggaccgtaaaagaaaagatgaagcagtgaagcaataccatttaactctgagggaagggtcaaaagaattcggcgtttttgtaacgatttcatttgatccttatagccaaaaggtcaataaaattgccatattagaagaatatcaataaggtcctccattttttgaaggaccttattcatttatttgcggttattttttccgtttcagccaaagtcggaagccatagggtaaaataccgaaccactgctgggaagcaggcgtttttgtttctttccacacctcttttcgttcttttcgctcatctctcggagtatctatatatttgacaaattgctgcgtcatatatttaacataatcattcgttttcacgtgatcacctcatcattcaattattatgagtgttgtctcacatgactttttttataccctttacactgttttattctgtccatctcagcagctttttctgtttttggtcaaacacgatctgtgcagttctttctgttcccgactccgttgacactcttaagttgatttctttttgttcttttatcgatgtatcatgaatgtaataagaaacccgtccatatggaaattgctgcgtaccctcctggcctttccgttcctctagaacatgccgaatcgaaagaagcaccccattttgaagcaaattctctcctatgtataactcttttgtttccttctcaaacatgcagcgtgaaatatattgagcagcagcaaagttcacgattaacagcacaagcgctgacacaaaaagaacagctgggtaaataaaccctcttgtacaatacattcacccccctcctaaatacgaatagactggaaaagcagtttgatacactttttggtcctcactctcaattttcagcaaaacaacacaattttcaaaatcagctttcatggcagtaatatgatctaaaatcggaacatgccctttaccatccactctttttcttatcattgaatgataaatttcgaaacggatgtcctgcccggaaagattggtgcagattaacacgctcccatgctcggctgtcttaactgcctgtgactccttgcattcattcatcatctgttctatcgaaatcatccattcttgctgtgtgaaaccgtcatgttcctgctgtcgagacaaaaacagatggaaaatcgcagctaacgatcctgatatgagcaaaaagactgagagcgaaaataatacgttaagaagcgtatagccattctgtctgcaggatgctgaggcaatatgatttctctttataagctgtggctttgatacatacgttttgatattcgccctcctcctcccacttcattgcatagatatgattgttctttgtaattgtttttgacgcggctccttcaccactcatgacatatttgctaatgctctcattcatcatctgatagccgatttctcgtgattccgccattttttcatcagctatcagcttgtcccacaaggggacgactgtcagcagcacaaacagccacaggcttagcgcagacattgtttctattgtagaaaaacctttattttctctccacattgactctcccgctccctagataaactgttatatcatatacggcatggccatttactcgtatttttccgcctgcattcgggtgccctttctcattaaattccaaacggtcttttaatgtcagcagttctatagaaagtccccttgcatacggacgttcaatgaccgtatcaccaatgactaattgatattcttttttatgaaagaaaatttttgttctttgttgacgggaaatagcaacctgctgtgtgagcataatatcatttttcagctgccttgctgcctgtcggacagctgtattgtcataagcaggaggaagtgtagtgaagacggccaccaggaggatagaggcaaggcttaacacaagcaaactttctaaaagggtaaacccctcctcctcgtttaatttaatgttcaaccttaacttctccgccggtgatgataatgcgcttaccatttggacagacagcatcgtttttcacatagccctctgactgtaaatcggcaaggctcggagtttgtccttcatgatcaagctcaaatgcagtcatttgtgccttaaccatgttttgtaagccttcacagccctttttttgaatggtttggttatgtttcgtgacgttcggtatcgtaattaaaagcaaaatcgaaataataaagagcacgattaacatttcaacaagtgtaaatcctttctcattcattagcctcttcctttcacatttgattcatcatctgatacataggcacaagcatagataaatacacaagtaagatcatcgctgcaacaaatccataaatcattggctgaaggatgcctgtccatttttgcgctttgtgttccagccgctgtaatatgaattggctgtatgtgaaaagctcccgatccaatcggccgctcagctggccgtgagatatgacttttgataaatcagtttcataaaaagggcttccacaaatagcggattcaattgactcaccggcttttagccgttcaatcaattgttcagcctcgcagcggtagaaagggagaaacgtttgatgtttaaatgcattaaggctgtcataaattgagaggcctgattttaaaaggctgcttagctgcaaagaaaaaaagtagctgttaaacagcttgacaagctttccaaccaaaggaatcctgatacaaatcagcatttgccgggcaggtgattttttcttaaacacaagccaataataaatcccgatacctgctgtaaaaagaacaagcaaaatgatcacaagatcaatatgctgaaaaaaagcaaaaagtatatcggttgaacgtgaggtttccatattcatcgattgatagataccggaaaactgaggaatgatgatggactgtaacatataaaacatgacagcgaccgtaaagatgaggaaaagcggatagcgcagcactcttttcagctggtctgcctgtgcaatttttcgttccagcagctctccgctctggatcatggaagcaggcagttcaccatgtgtttcagcaaaataacaaatacctacggcttccttatgaaatgacaaactctttagtacttgataaaacggagccccttccctcaaacaagtgaccgaatcagtcaagtcagccgcctgcctcttattcatctgaagttccatcaggcgtaatccatccagaagcgtatatccgcccgcagtcatttcaccgagcctctttaataacctcgcttgatcctttaacgaccagacttttctaatctttttcatgataaacccaccggtcatagttgtttgtcgttaaatagccgagcgcaattccttttctgataatttgacgaagcgtttgatattggtaatttgcatgatttccttttgcctcctggatacattgctgaagatttttcccgtatagaagctcataaacgctagctctcctggtatttcgtgactgtcggcaatacactgatgaacatccgttttcacaaaacgggcaagccaaatcaaccaagcgctgagccgctattgcaatgacagtctgttcgatttcattcatattgataccgaattcaagcagtctgtaaattgcgccctttgcgtctctcgtatgaaggctcgttagtaccagatgtcccgtcatcgctgcccgcaccgcaatttcagctgtttccgcgtctctgatctcacctaaaataatcatatcggggtcatggcgcaaaattgctttcagacctgcggaataagttacaccggctttttcattcacctgaacctgaagaacatcttcgtcccttgtttcaacagggtcctctaatgtgacaatatttcgattaaagtgtttttttgcatattgaacgagagagtatagtgtggtagtcttccctgaaccagttggcccggtaaaaatgagcatgccatgggaatgttttaaaaacgagagtaatgtggctcctgtcttcggaaatagcgacaatttatcaatcgaagggatattgtattggggcatcactctgatcacgaggctttcttcattaattgtgggcagcgttgacattcttaaatgaacatttccctctttcagctttaacgtaagcgaaccgttttgcggctttcgcctttcacctatatccattgctgaaagaaatttaaaatgtgaaatcagccttacgcactcttcttttttcatgtccctttttttcagcaaggcatgatcgacccgaaaatgaatgatagcgtcccgctccctcggcacaatgtgaatatcagaagcctttgttagatatgcctcttcaatcaagtttttgcttaccttttctattgaatccaatttgattccctctcctttcaacgcatattgtagaaaaagaagaaagggtaatcaaacaaggaaaacgtgattttgtgagatgttatatgctgaaaaaccaattctttctggcaagaaaaaaaattttcaactgaatgtgccgctgtcattataattttccctataaataaaaaagcagacatggtcaccatgcctgcttgattccattttcattatgctgttttcgctttttgaccagtatctttttcaacggaaaggtcgcctaatgcaacaataccggtcatttggtcattttcaagaatcgataaactgcggatttgatgctctgccataagcgccttgacatcgtatccggtcaccctgatatgtctggtgaaaaagcggggcacgctgcacaaaatatgaaacatcctatagagtccgcctttttcgaggtttctttttcttcttccgctcctgcagcatatctcccgtccagccttttttcctcaaatagagatagatcaggactgtagatgtgacaatcaataagagagaaaagagatatccgtatttccaattcagttccggcatcactgaaaagttcatcccccataaggcacccagagctgtaatcggcgtaaaaagcgtcgtgaaaatggtcagtgcttttacaatttcattccccctgtgtgaggtaatgacttcctctgaatgcagcagattgttaagctccccttcaaattcgctgatgtatgtaaatcccctgtcaattttcagttgtgtccgctgataatcctttttcccttcattttgaggtaaaaaggtttctttcaacgccatttcaatttttttggcgcttaatattaaatttttccaaatcatcagttcatggcgcaggagatggacgcggtttagaatgcttttgctattgtcgtctttaatttgccatctgagctttctcagctttacttcaaattcatcaacaccgattaaatacgcattcattagttcgccgagaagaattaaaaacccctctatcgcattgtccgctctttccatttgccggacaacttctttgcctttaatctctctcaaaatcgaaaagtcaaaattgattgtgaaaaaatattgtctggtgatataaaagtgaaaaacagtatggtctttttcttcaccaagcccctgatcataaacaatcgacccaaataccgcttcattttccgtttcagttgtatctactcgcaaaaaattaacgtgatggttattttcaaaccacttttcacactgaggccagtgagaaaaatggattagatctcttgccttacttctttcttgaggccccatttggtaccaaaaccaatcctttcctgtatgtgccttcatgtcaagatcctccaaacttttgttctttattctttaattgcccaataaccgcgtcactaaaccagtctgccgcttcaacacatgttttatgagcattttcaggtggtatggaatgtagaaagacatcggaaaagggaggtgcatgccttccttggagaaggcagttgttttggaatttatcaatttactagcagtcgctattctcattttgttaacaggattttttgttgccgtagaattttcaatcgtaaaagtgcggcgatccaaaattgatcagcttgtcgcaaaaggaaagaaaggttctaaagcggcaaagcatgtcatcactcaccttgatgaatatttatcagcctgtcagctgggcatcacagtcgcagctttaggactgggatggcttggggaaccgactgtgcaaactctgcttcgaccgctttttcataaagcaggcttaaatgaatcgcttacccacctgctttcactcgtcatcgcatttttagtggttacgtatttaaatgtcgttattggggagctggctccaaagagtttcgccattcaaaaagcagaaagcattaccttgttgttcgctaaaccgcttatttggttttataagatcatgtttccattcatttggctgttgaaccactctgcccgattgattacaggagtgtttggactgaagccggcatcagagcacgagctggcatatacagaggaagaacttcgggtcctattggctgaaagctataaaagcggcgagattagaaaaagtgaattaaagtacatgaataatatcttcacctttgataaacgaatggcaaaggaaattatggtgccgcgaaatgaaatggttagtttatcactagatgaagactccatttcaaatcttcaggaaacagtcaagcaaacaaaatatacacggtacccagttgtaagagaggataaagataacgttattggcgtgattaatatgaaagaagtgctgttttccatgctgacgaaagatttttcaatcaagaagcatcaaattgaacctttcgtacagcccgttatccatgtcattgagacgattcctatttataaactactgctgaaaatgcaaaaggaacgcactcatatggcgatcctcatcgatgaatatggcgggacgtccggtttggtcactgtcgaagatattatcgaggaaattgtaggagaaatccgtgatgaatttgatgcggatgaagtgcctcatatccgcgaacttggaaaggatcattacttgttaaatgcaaaattattaatcagcgatgttaacagcctgcttggaactgatttatcagacgctgaagtagacaccttgggcggctggtttttgacacaaaacatagacgctgagcctgaaagtaccatagaatatgatggctactcttttaaggtaaaagacatcaacagccatcacattttatttatagaagtaaaaaaagctgaatagcccgtgaaaggctgttcagctgctatctttcaagataaacatggcaaaggcatcaacactcttttattttaaaccctttattggccagggctttagcaagactttgctcggttttcacattcgaaaaatccagacccagcttcacgacagtttgggcaatttccggcctgattcctgaaataatcgtctcaatgccgagcaatttggtgctgtcaatcactttaaaaatttgataggctaccatggtatcaacgataggaacgcccgaaatatctaaaaataaatacgagagctttaacgctgagcactgctccagcacagactccaaaatcgtcctcgctctgtgcgtatcaatttcaccgacaagcggaagaatcccaattccatcagtaatcggcataatcggcgcactcaattcattaatcatttctttttgcgcgtttaattgtatcatggtcacctggtgatattcttccgtaaacacttcgatgatctcatcaatgttttgattcaagatccggctccactcataaaattcctgaatgctgatgtcttgagaagaagcttcgctgaatttatgaatccattcaaacatgatgtgcctgaaagtgttaaactggccgacactttgtgtaaccgtcacttcatgaacggcacggtctctggcgcattgaagagaccaccggttgagctcatcctctacgtcttcttttctaagggattttgctacgatggtcaccaataattcatgctggtcttttaacttttgttctagtttttgctgatctttcgctgaatacagccagctgcctgttgatgtacaaactttcagccattgttgcgtgatatcttctttgtgctctgttaagtgctgatcaagagctatcatcttaatgagctacctcctgtttttgaaaaatgtacgctatatatgtataacgcgtctgcctttacacatactatgtttagattcaatgggctatagccaagcggtaaggcaatggactttgactccgtgatcgttggttcgaatccagctagcccagtttctgaacaggtgaaaaaccgaagacaagctgattcgaataaatcagcggatcttcggtttttcatcatgcagattgatgaaccgttttcttcttcgataacttcaacagttctcccgggttataaccaatcaccagctttttgttgtctactagaatcgggcgtcgcaaaagcttcggcttctcgattaaaagttccagcacctcatttaccgtcatttcttcaatgtttaaatttaaatttttgaaagtctggcttcttgtcgccaaaatttcatcaattccttctgtcgttaacgataaaatgtactttaattcttctcttgtcggggtttctctgaataagtgccgttcgttaaattcaatttgatgtgctttaagccaatgttttgtttttcggcatgacgtgcagcttggatatgagtaaaaagttaattgttgttccattcgttttttcctcctcagttaaccatctctttgtagaataactacccggatcatttttcatttaaaccatttacagaacttttttcggattatttttttaaaaacattcatacaatagaaaacacaatcaaagggacaaattccatttgtatattaataatgaaaatgtttacatttctaggtgtgatccattataataacagtcagagggactctcgggaggggataaaaatgaatcgcatgttccgggtgttaggattttggacgggaatttttgcagtcatgttttatttaggtgatatgaaagatgcttcccttttattttttggacagacgatcttatttgtgtttctatcgtatttgaacttaaccgaacgcatgtatatttatatttttggcgcttatttaacaattttcttcgccggctttacatattactcaatttttattatggtgcccggcggcggaggccattaaatgcagaaagagacaaaccttatcggtttgtctctttttttacaatgaaaacccatttaaaaacggattttggtcctgctcagtcagtacgtctgtttcaggtccatggccgcttaacaccagcgtgtgttccggaagtgtaagcagtttttcatgaatggacgtcagcagcgtctcttgattgccgcctattaaatccgtacgtcctataccgccttggaacaagacatctccggagataaccaagtctgcatctttcacgtagtaagacacactgcctggtgaatgtcccggcgtaaataatgtttccaaatgaaacggcccgatattcaactcaccgtcgccttcaattagatgatctgcaggcttagctgttacttctatccctcgcagcatgccggagccgtttaaagaagcgtccgtaagccaatttttttcattttgatgcaggtaaacagggatatcccatttttctctcacttcatcaagcgccccaatatggtcaaaatgggcatgtgtaagcaaaatggctaaaggcgtcagccctttttcttttatgtattgattgattttatgtccctcgccgcccggatcaaaaatcaggcattgatcatcattgatgagaaaatatgcgttcgcttgaatcggccctactggcattcgtctccatttcactattatcacctctttcttttttatgctcttattatgagggttttttaaaaaagattcaaacaatcgcaatgaaaacgctatcgacaaacctataaaaaacaggtagaataaaactggaaagaattgcaggtttttcaatgtaaagggggctgtgttatgttacttgtcgtgattttcggccttgtcgctcttttcgctttatggggagtcttgcgttctgttagaaataaaaatatactcgggtttttattagccggtgccaccttatttgtctttggatggtttaccgtgatgaccgtaataaacagcgggtatccaaccgcacattaaaacctgtatccgatcggatacaggtttatttttatggctgtaaatgtttattgacactttctattttgctctcaagcgtcgtttttttgtcacgcctgtcatcgatacggatattcgttgccactctgtgcaatcctttttgaaatggcgcttcgtgaattgcctgaatgactgcaaaaaggtcactgagttctccctcgatcagcgtattcatcggtgtcagctgatatttgattttcccttctgcttgatatccttctaatatcttttgcacatcggctacgtaagcactgacactgggtgtttccgtaccgattgggataatggttacatctgcgatagccatcgttattccatctccttttgatcaatgatgagttgcttcgtttcatgtgatttcaataaaataatttgctcaaaatgaaagccgtataacgcatatttcccgttcggagatatttgaatcggctccatttcccgcagagacacaagatcttttgtctctcccgatgctacattgattgctgcgagcttatatgcatcgccgctttgtttgaatgtataaaacaggcttcctgcttcatcatagtcatactccattggagccaaacttgtatatttcgcttggagcggccatttcgctgtaacaggtgatgttgattgcggcgttttaaactgatacgtcccttttcctccggaagctgatttgacagtaaaactcatttgatggaaagaatcgaagaatagaacgttatcctcaagcttctgttccgtcttagaagctgtatcgaacgtatataaaggccctgttttatcgtctcttccctcttttacataatcaaatgtatttttggatgtccaatgaatgaacggaacctgtactgggcttaagaaagattcgtcttttttagcattcacctgatatgtatggaaatcccagttttcattgaattccgtcaccatcatttgataaggatcatactgattccaagcagcttcaagctcatacgtttcgtaatctttttcgtaaagcgtctctccttctgcattaagcaaaaccactgccgtcttttggctatgtgtgatttgcagcagaatcatctgctccctcgcattgatttgaacatcaacgatttgaccatccgtttgatagagctttttcgctttgcctgtaaagatgcggtacgcaaaaagctctgttttcgtcggattagacgcagtatataatattgtgctgttattcagccagccttccaccccatccgctttttccgcggaaagcggtatgatgtcttttttctcatcttttgccgccgatgcctgtttttgctgctgatgagatggttcgcatgccgataaactaaacagcaataccgccagcagaataaaacaaactgatctcatcagcattcccctccgatcatctttattctctcatatttgcttcggcagaaaaaagaaaaagtttcagttactcatgaaaaaataacgccctccacaagataccgcttgtggcgttatatatgtgtgaaaactgctgaaacggcaaaggattttggccttttccaagttccaccgtatacccttccttaaaataatggtgaataaaccagtcacgaaatccagcatagctatctatatcccttactcccttataaatgttcccgcttaactcctcaaaatcctttatgacggcagcagattcctcaggctcaaggcctttatagccccaataaatttcttctccttgagtatgaagagccagcagtctgtcaggcggattctccgtgatcagccggtacatcgcaatagattccggctccgtaagcggagagattcccggaaaatcgcggtagctgggtgctgtcggttttcggtatttttcaatttcccataatgatggaaattgtttatttaaatcaaccccgtttatattcgccttccattcattaaaatttggacgatgttcatttagcctttcgagttcatctcttctggctcccatgacttctgatccgtttaaaacaagatcaacgccatccggattgacaagaggaacgagggataaggatgtgctgttaaacagctttatgggagaaaagccaaagaaaggcgaattgcagcataatgacatacagtattccttaaaccattttagcaggacagacgttgtaatccactcattcgcatgaaatgacgcgttcatatggaccttttttacggcatgctccccaccagccttcagctcccagataggcctgccgagtacagaacggccaatttcccggcatgagacaaacggaaaaacatcaataatcttctttatttccttttcaacagctgaatcatcatagattttctcttgctcaatccagctatctgaaagtttcagctgccgaggctgtaaaaagcgctttatgtcctgaatggtttgaagctctttgccgctatgctcctctatcacataaccagggcaatacaattgatgtttttgtgcggagcgatttgcacttttaagcaattcctcgtctatcttcagttctttcgccacattggccaaattgttcttgatctcaggtttcacagtaataaacgccatcatcatcccccttttttgttactatatgacagcgtatttaaaaaaagaaagcctcccgctcacttcaatgcgggagacattgtgattatgatgcctgatcaagcatttgtttttctttccgctttgacgaattgtccagccttttctggtcataaaatcgcaacaaatccccataaatgatttcatcagaaagtgatagctcctgttttgctttatcagcaaatgcttcacattgttttgtctcttctaacggttttcccgtctctttgtcataacacgcaccgtctgtataaacaacctgatctgtgataaagctcccgtcccggagcaccgtgaagtccagtttttcgtctgaaagcagatcgttgccgaattgaatttgatctttcgtatcaatccctaaaagattcatcagcgtcggcctgatatcaatctgcccgcctactgtttcaatggtttgcggctttttatcagtaatacccggaatatgaatgaccagcggcactttttggagctgtacctcttcaaatggggttatttcttttcctaaaaactgccccatcgcttcattatggttttctgatataccataatggtcaccatataatacaataacagagttgtcgtataacccgtcttccttcagcttttcgataaaccgtttcagcgcctcatcctgataacgcactgtcggaaaatatttatttagcgtctggctgcttgaatcatattcatcaatcaattggtcctcttcatcaagatcaaacgggaagtggttcgtcagtgtaatcagcctcgagtaaaacggctgaggcagatttttcatcagctctgaagactgctcaaaaaattctttatccttaagtccccagccgactgaattttcgtcagttacatcatacgagttaatatcaaaaaacgaatcatatccaaatgagtcgtacattaaatcacgattccaaaagctcttattattagcgtggagcaccgctgaatagtatccgctgtttttcaaaatttcaggagcggccatatattgattgcccgcattcgtaaaaaatacggcacctcgtccaagcggatacagtgaattgtccacgataaattcagaatccgaggttttcccctggcctgtttggtggtaaacattattaaagttgtagctctgttttataaagtcattcagaaaaggcgtgatttcttctccattcaatttttcattaatcacgaagctttgcgtcgactctaaggatacgagaatgacgttccttccttttgcagcgccgaataagcgtttgttggcatccttcacattagcggttacgtagttttcaatctccgtcaggctgttgctgtctgccaacgctctctgtgcggattgctttgactgaagaacgccatcgtaaatatgaaaattaaacaggctaatgtttttaacaagcatttctctgtcaaatgagcgtgtcaatagctgaggtctttccgcctcagacaagcccaggttgaagaaataaacagaagcaacgaacaaaaaataagccgcccgttcatttttcgttgagggaatgtccgattgaaaagctttttgccggatgtgaagccatattaaaaccgcaatatctacagctaataggaggtctgtcggctcaagaagtgttccgatgctgcttccgagatcacccatattgctcgtttgaaaaagaacagggattgttaagaaatcattgtaaaaacggtaaaaaaccatatttgccagcaatacaaacgtgacaagacagctcatcgcgataatgtagcgatttctgtttttgccttttaaaaacaggctgaggccaaaaataagcaacaaaaaactcaatgggttgataaacagaataaattcctgtgttagattgtcgattttaatatgaaaactggttttgtaaacagcatacgttttcagccacatcaataaaatggcaatcagcataaatgaaatcttcgaaaaaaacgtttttcgcatttcaacctcctatgcagcacgctcaaaaaaatcagtctattcccaacattctcattaacacatcaaattaaatcttaacctgagcacaacaaaaaatcaatttcatttacacaattttaacaattttgatgtttcagccattcatttttagcgatccaagcgcctccgataacgccggcatcatttccaagtgctgcgattgaaatatcagcagcttgggctgcccgcggaaacgcgcatttgcggaatgttttctcgacttttgatctcagcagttctccggctctcgatacgccgccgccaagaacgattttggatggattaagcgagcttgccaaatttccgagcaccaaaccaagatgcttggctacataatcaaccacctcaagggcaatttcatcattttcacccgccgcttcaaacacatcccgcgctgacaattgttcggttgcttttaaacgtgtcgtctttttagcatttgctattttttcttttgcaattcttacaattccggttgctgacgcaattgtttcgatacagcccgttttgccgcagttgcagggcgctccgccttcagggatgctgcaaatatggccgatttctccgccggcgccatttataccatgtacaatttcaccatttgcaatgatgccgccgccaactcctgtgccaagcgtcacgagaatgacgtcttttgcgccatcacccgctcccttccacatttccccgagcgcagcaatattcgcgtcattttctataacagctgggatgccggtttctgtctccagatggtttttcaaagcataatttttccaccctagatttactgtttcataaaccactcctgccgccatatctacagggcctggtgcacccattccgatgtatttgatgatgtgcttcggtttttgcagctcatccagcttgctgtcgattgtttttgcaattgtgacagtaatcgtgtcgccggttttatcagtcggaacttcccacttatgctgaatttcgccatattgattaataaaagcgagtttaatcgtcgttcctcccaggtcaatgcccgcaaaccatatctcgtccatttttatcaccttagcctttataaaaatctcttccgttttttgtttgttccaattcttttcgaaggacagctgccgctctggcccactgctccttttcaatcatgtggttcatgtataattcctttaattcatccagcataaactcaatttcaagctctctgtctccaaaataaacaatgtggccaaacgtttttaacagctgctgcacatcataaaatgtattcattttcctcaccatttcttgaacttaactatcataagcgtattcataaggaagcggtcagtcaagaagaaaacgctgacaaaaaagccagcttcctttccatattccacctctatgattctttattgttttcaatttgccgctgcagctccttgtagcgctgctccttcggcttcagtttcacagccgtctggatggccttttctgcttgtgcaagctcatttttttccgcatacaataacgctaaattgtaataggaagcatggtctttaggttcttttttcactgctcgttccaaaagggaaaccgcctgatcatattcgccgatttgaatatcagaaacagcaagaattttcaaaagatcggcagaggcatctttttgcgctgcttctccgttcagcaattctgttacttcttcatactttccttcctgatacagctcgcttgcctgctgaatcagcgctgactcctggtgtgaaggcgaatgcaatccgtaatataaaaatccaacagccaaagcaatcagcaaaaccgctgacaacaatctttttccaaaggctccggctttaggcaaccccagtgctgctgcagcgaaaaagccgccaatcaagccgccgatatgtcctgaattatcaatattcgaaaccgcaaaaccaaagcccagattgatgataataatgacaataatattggttcctatagttcttaaaaacatttttcgattagacaaagcaacatacagtaatgcacctaagcatccgaatatggctcctgatgcccctgccgaaggatacgggctgaacacaaaactcgcaatcgaacccgtaatgccagcagccagataaatcagcaaaaatctccccgatccatacatccgctcaaccgctgtaccaaccgaccataaagccagcgtattaaaagctaaatgcgctatgccgatgtgaagcacgatcggtgtcagaagccgccaccattctccttgtgcaatcaggctgttttcttttgctccaaaagccaccagtgtctccgtattagtgctgcctccgtttatttcgagcaagaaaaacatcaggatctgaagcgcaataaataaatatgtaaaagtcggttttccgttttgaaaaaccgccgcttcagtttttctctgttcttcttgtttcagcactagcgaaaggaagcgttctcgcgccatttgcgcgttttcaaacgaagcgtgttcctctgaacaatcttctgtacgaaatgatggaaaaaccgcttgaagatcatctcgaagcatcgttcctctaacgatcgccggctcaactgacacagttcccttctcaaaagttttttttgcaatctcttcccagtcatcaacaggggcttccgttgaaaaaaacacattcagcagcttcatccttcgtctgcccaattgatgtctgactcgttctactcgttcggcctgctcttcgatgtctctaaccatttcttgacggaaatcaagatcgtgcttataaagacgaactagatcatgagaggacttgtccggcgcttccagccatatttcatctgactcaccggcttgtatgacgccatacccgctattcaccaggtgcgccgcaattttccaatatgtatactccagcaaaaacatgtttaccgctccaatagtttttttttcattataacagctggcgctccgaaacgcctactgaaagcaaaaaatcccgtttttcacgggattttagaaagcttgctgtataaacttattgcggataaatggaattcttaaaaacaaatggataaaagaccgcctgattcctggctggctgagtacagtattcataagacggtagcgattttgataaaacatgacggcagaaaccgcgaaaatggcatatatcaaaagttttttcatgatatccctcctgccaatagggtttgttattctgccttatttattctcgaataagggacaggaaagttatgaaaaacaagaaataatccgatcctctgttatcagcttatgtaccgggatgtcatgcggcaaacggggtacgtgcgcaaacagctggcactccaaaagcaaagagactgtctccccttcatattcacttaaatagcgatcataatagccgcctccaaagccgaccctaaacccgttaacatcaaaacaaacacctggaacgatcaccaagtcaatttgtgatgggtttacttcttttgttttttcaattaccggctcgagcagtccggcgtaaacggtttcgagctgatcatcggtcttatatgtccgaaattgcattttcttcgtgtccggatggcattttgggatgcaaacttgtttcccttcttcccaagcctgctcaatgacaggacgcgtcggtatctctaatcctctggagatggtgaccgcaatggtgccggcattttgccactccggcagagaaaacaagtacttatacatacgttccgttttttgaagcagatcttcatttgataaagcagacagtgcctccagcgtcttttttcttaattgtgatttcatctctcatccccctcggaatagaaaaaaagccagaacctttttcaaagctctggcttttttcttacacctcaaacagcaaagctgttattttgtttcacggtgtaacgtagattttttatcacgtgggcaatattttttaaattcaacgcggtctggattgttgcgtttgttctttttagaaatatagttacgctcaccacattcagtgcaagccaaagtaatattaacgcgcattattttccctccaaactaaaatcatttacttattcagacttatatataataccactataatggacggaatgctaggctgtttttcaatgaattgctgaattattgaagatacgctcataaagctgcaaatatgatgacataatgagtcgggggtggtggagcttgaacacttgttgtctgccagcttcttttatccggcgggctttttcccggtcttttaaaaagctgtccagcagatcagccgcttcctgtacgagcgtaaaattagcgatgattgccgttttgtcatgaacggcataatcacaaaaaccacccgactgagaaacgacagtcagcacaccttgttccatgctttcttgcgcggcaagcccaaacggttcataagaactagggaaaacagccatttcacattgagacagtaacgttctgatgtctttcctattgagaaacggcaggaacatgacgcgatccttcaggttatatgccgcagctaatttctcatagcaggacagagacggcccctccccagccagcactagatagaggtctggctgacgctgcttcaagatggcaaacacctttaacagctgcgaaaatcctttttccggaacgaaccttccatatgaaaagagaaatcttctatttatgcttctttggattttccccttctcttcctccatagatgcagggcttgggataacggttatttttttatgtgctgccttattaagagaccgcttcataaatgtgcttaatacgatcaatgcatcagcggattctataaggagccgttcggtcttgagcctgtatgggtgtggggcttctcggcacaccttcttcctttctctttcaagaccgtggattgtcgcagtaagcggaaggccaagccgttgtttcaaatactgggcagcaggggcagttgtgtcatcatgggcatgaatcagatcaaagcgtttattgtgtgataacacatggcgaaccattgtaaagttagcatcagctatgtaatcttcaaacttcgcatacgaaaacagctgcccgctcggagtaaaaaccgtaatgttgatatgagggtttaaataggaaatgaggcggtttaaatggacacctagcccgcttttcggctcatcgggatgttcgggtgaaagcatgagaatgttcaccgttctctctcccctctcccataacaggtgtatgcagaaaattgctcctcccacctggtgtgcgcttcctcaatctgaaagctgtttatatgacgaatcccattttcatcaagatagatgtcgtctgtatcggcaagcttgagagagacattcattgaattcacaatactgtattcagcccgatatacagcatcaccagccgtctgtctaatcgtccattcgcctttatcatacgttgtgcgttttgtcctgacagcttcaatgtcttttcttttgatgacaatccgcaattcttttatcatatcctgcgttttttcgaaaaggacagcttcagccagccgcattgtttcttctgagatttcccagcttacggtcaaggtgtgagcgttttgaatgattatgtcgaatgtgtccctaaaaaaggaaagcttatgtcgtatattatagggaaatgggtgtttatccatggactcttaacattctcctttccaatcgttcacttcgtgttcctattaaaccattacataaagaagaagcaaagaaagatttctcgacaaaatctcgtttttttcgcgaattcctttagaaactattggttttatggtataaaaaagaaggataaaaaaagaatagaaggtgatgaaacgtggaaattgctattattgcgttgtttatcgtcagtatagcgctaattgcattctcatattctcaaagagacccgatgaaagatgtagaacaggagctcgaaacactgcagctttctgcgatgcaggaaatttacaagctcaaaaagaaaatgacagtgcttgaggaagaattactggaaacaaaccttgtcattcgcaaatcaaagcagaacgacatcaatcaaaaaatcgctaaacaaatactttctaaatataataacggtatgtcagctgaagcgattgctaaagctgagcatgtatcagtggaagacgtgaatacgattatcaaagataatgagaaggtgctcgtatgacaaaacggggcattcaggcatttgctggcggcatcattttagcgacagccgttcttgcagctgttttttatctgactgacgaagatcaggccgctgctgtaaaagataataaaacagtaactgaacaagacgtgaacaattaccttgattctaaaaaaatggtttctgtgaaccgtgatgaatatcaaaaacttcttgattcaaaagagaaatcgttgaccgatgacagcagctcagacacgaaaacagacaaagtcaaaacgtacaagctcaaaattaaagatggcatgagcactgcggatgtatctgctattcttgaaaaagagggcattatctcttcggctcaagactttaatgactatgtcattgatgccggctatcacaaagaaattcgtgccggcgagtttaaagtaaaatcagacatgagtttcaaaaagatcgtaaaaacgttaacacgataaaaaaacaggctgactcagcctgttttttttcatccaaactttcctgaaatgtaatcgagagttctttggtccttcgggttagagaacattttattcgtattgtcgcattcaacaagctcgcccatgtagaaaaaggcggtttgatcagaaacccttgctgcctgctgcatgttatgcgtgacaatgacaattgtgtatttatttttcagctctagaatgagttcttcaatttttctcgttgagattggatctagtgcagatgtcggttcatccatcagcaaaatatcaggattggtcgcaagtgctctggcgatgcaaagacgctgctgctggccccctgacagcgaaagagcggacgtatgcaatcgatccttcacctcatcccataacgccacgtcttttaatgacttttccacaatttcctgaagcttcttcttatttttggtgccgtggactctcggtccgtaagccacattatcaaaaatagattgcggaaacggattccctttttggaataccattccgatattttttcgcaaatccacgatgtccactttatcctttaaaatgttgctgccattatagttcagctcacctgcaagctttacattcggcgtcatttgaatcattaaattcaatgtcttgataaaggtcgatttcccgcatccggatggcccgataatcgccgtaacctcattttcataaatgctcaaattgatattttttaaagcatgatgctgtccataccataagttcattccattgacttgatagacttcctgtttcattacagcttcggtagcaatactcattgccgccctcctatccgaatttcccgttaatataatcctctgtcttttgctttttcggactcgtgaaaatctgttcggtctgtccgtattctacaagctcgccgtttaaaaagaatgccgtccggtcagaaacccgcagagcctgctgcatattgtgcgtgacaataataattgagtattctcttttcaatcctgtaattaattcctctattttcgcatttgaaatcggatcaagcgctgaagctggttcatcaagcagaagaacagccggcttcatcgcaagcgttctcgcgatgcataaacgctgctgctggccgccggataacgagagtgcggatgaatgtaaacgatccttcacctcatcccagagggccgcttttgttaaactttcttccacaatttcatctaaaacagctttattccgctctccggcatatttcaatgcatgtgtgatattcgcatagatcgatttcggaaatggatttggtttttgaaaaaccattccgatttctcttctcaagctgacaacgttaatattgccgcccaatatatttaatccttcataaaggatttcaccttccgctcttgcagatggaattaaatcgttcattcggttaatatttctcaaaaaagtagattttccgcatcccgacggcccaattaaagcagtcaccgcatttttttcaatatccatgtttacatgatgaacggcttgtttatttccgtaaaaaatggacagatctttgacctcaagcacgtggttctgcttcggaacaataacagctcgctcaggtttttcttttaccatttgttcagacatgcttttcgcctctttccgttctaatttgccgtaagctttttgtagatcatcgtgccaagccatctcgccgcgagattaaacacaagaacagaaatcaccagcacggcagaaccaccgttggcaatcgcttcagcatccggaatcattccttgtgtattgacgttccaaatgtggaccgcaagtgtttcagcgggcctgaaaatattaagcggtgatgtttccgaaaacgggttccactccgtaaaattaagacgcggtgttgtcaggcctgccgtaaataataatgcggccgcttccccgaacacccttcctgacgctaaaattgctcctgtgataatagaaggaatcgcacttggaattaaaaccgtttttacggtatgccagcgtgatacacctaaagcgagagaggcttccttcagatctttagggactgaacgtatcgcgtcttctgtcacacgcaccatgacaggaaggttaaaaacagttaacgcaagcgctccgcctatgatcgtatatccccagcctgttaagttgacaaacatcaataatccaaacattccaatgacaatagacggaagagatgaaagcacctctatacatgttctgatgaagtcagttactttgttattaggcgcgtattcagccatgaagaccccgccgcccacaccgagcgggattgtaatcagcattgtaataaacaaaatataaaaggagttaaacagctgatctcgtatgcctcctccagctgcaatggcgctcgactttgttgtaataaattgaaaactgagctgagaaacaccgtttataataatataggaaaacaaacctactaaaatggcagcgataatggctgcacacaaaccaaacattccggtcgccagtttatctgttattttgcggttcattacactttcctcctagatgacaagtagcgaataagcaggatgaacaagaatgacatcaccagaagcacaagccccattgaccacagcgtattgttttcaacacttccgtatgtggtgtggcccatattcagcgtgatgatcgttgtcagcgttcccgcagtgtcaaacaggctttccggcaatactcttgtatttccaatgaccatctgaacagccaaagcttcaccgaacgcccgagccatgcctaacacaacagctgtcatcaatgttggaaaagctgcaggcacaagtacttttctgatcgtctgccatcttgtggccccaagcgcgtaagaaccctctcgtaaactcttcggaagagaagccattgcatcagcagaaatcgatgtgatcgtcggcagaatcatgacggaaaggacaatcgttcccgccaataaactgtgccctgttccgctcgatttgaactgggcgataaacggcaccaatactgtaagacctatgaatccataaacaacagatggaataccgactaaaagctcaatcaccggctgcagcactttctttccccaattcggggcaatctctgtcatgaaaatcgcacctgcaatgccaagcggcgcagcgattagagcagaaagaatcgttactgcaaatgagccaaaaataaatggcagcactccgtatttcggatcagtatctgtaggattccaatttaagctcgttaagaattcaattgggcttacaccatttacaagaaaagattgcagccccttcacgccgaggaaaatggtgatcgcaacagatgccgcaatcataatcagggcacatgctgtcacaatcattcttccccgaacttcatccaattgccgattttgccttgagctgattaaacgctcgctcacagacatattttctctattgtttatcattgttttacactcctatgaatgtgttaagaggagaaacggttgtccccgcactcctctttttattaagatcagctttgcttccctttggcatcgcgtgtcactttcatatcagtaaccggaatgtagccttggtcagtaacaatgcttttttgaatgtcttcactctttagataatcaagaaattctttagctaaacctgtcgcttcaccttttgtataagaatgctgataagcccagatcggatactcgccagttgctacatttttcgcttcaggtttaacaccgtcaatagatagagcagttactttgtcatctgttaaatatgagaatgcaagatatccaatcgctcccggagtatcagcaatgatctttttcaccgtgttggaggaatcttcagtaatgccttctgcaggctccgctccgtcaagcgcatatttcacaaatgtagcacgtgtgccggaagaatcagggcggtttacaagtgtaatcttttggtctttgccgccgagctctttccagtttttgattttgccagtgaagatttttttcaattcatcttttgaaatatccttcacaccagcatcagggtttacagctgctgccataccaactacagcgacttgatgatcgacaagcgcttttgcatcgataccttctttttcttcagcaaaaacgtctgaattcccgatctgaacagctccttcagagacttgagaaagccctgttccagaaccgccagcttgtacctgtatatcagcatcagggttttcttccataaatttttccgcggctgcaagtactagtggctgcattgccgatgaaccagaaatggttaaagaacctgatgccttttcttctccttttgcagaatcgctattcgattttttactttctcctgcatttccgcatgcagctgcaatcatcataaaagcagccatcagaagcataagcaccaatttgttttttttcatttcctgaattccccctgcgtataatgtgtaatttgtcctacacgtatagagtaaaggttctatgtaaaaagggtttgaaccgaatgttaaggttttgtaaatcagtgcgtttttttgtataaaaaaaacgcccacatcatgtgagcgtttctttttagttatcagaagacgttgtgttttctgcattttcttcgattttgtttttattcttttgctgagtatcttctttgtcctgcttcgatttcagctcaaaatatttatccattacttccctgccgatttcgtttgtaatggtatatttagcgctgtaatcaatataagcccaagggactactacagagatcgcaatctcaggattatcagccggtgcataggcaacaagtgtcgtattataagtcgatgttcctgtttttgatttatcaggtccatcatagaacgattgtgctgttcctgttttaccggcaggctgatatgacgctgaagcaaattgactggcagctgtcccttttgtcatcacccgtctgaatccggcctgaacctctttaatatattcactcttcatgtcgattttattcagcacttccggctgaacggattgtacgacagcaccgatccctcttttagcatcaggttctctgacttcctttacaagctgaggctttaagcgatatccgccgtttgcaatcgttgatacgtattgcgcgagttccagcggtgtatacgtgtcgtattggccgatcgcatagtcaagcaagaatcccgtcaatctgtctgttcctttatagcctgtcatttcattcggaagatcaattccagttttgacacccagtccaaattggctgaagtaattacggaacgtatcaaaggccgtcgtatcaatcggtaaagcctggtgcggtttatattcaccttttccgagcgcgatcgcagttttaaacataaatacgttggaagactgctctaaggctctttgaatattgaccggtcctaagttagtccatgactttttaccgcgtttatcctgactgccgatatacaatggttcatcctgaaaaactgtattcagattgatagctccggtttgaaggcctgtcaagactgttgcgcctttgactgctgaacccatagcgtaagatgacgtcattgtacctaaagcgtaatcatcaattttatatttcccattttcttgtttaatctgcttgcccgccattgaaagcacttcaccgtttcttgggtccatcatgacaacgaatgcccggtctaacaattgcgtgcttggtcttgctttagcagatttgaggttcttctcaatgattttttccacttctttttgcaaatcaatgtcaatcgtaagcacgagatccttaccggctttgccttcagataccgtttttgttcccgtgacattgccgtttgaatctgtgatattttcgactttggctttttgtccctgcagaaggctttcatattggtattccaaatagctttttccgaccctgtcattacggctgtagccaagcgacagataatggtcgagcaagttggacggcaatccttcattagagctggaaacacttccgagcactgagcgaagaaggtttttatacggatattcacgttcccaatcggacgtgacatcaacacctggcagttcgtctaaatgttcacttaccactgccatttccttcgctgatacatcttcgtttttgatatattgaggggtcaatgcatagcccgaatccatctgtcttttgatagcgaggatctgcatatctttatccgtcaattcattcaactgcttatcagtaatccgttttagctgaagctggtataaatcgtcatcggatatttttttgtcttcaacctgctgtctttctttagagctaatgagctttttcgcttctttcggtctagtcaaaatccaataatcttttttatcccgttctgttactttttttgtatcgactttgatcatgtcagacagcttttttgcgatctttaagcgctgttcttgcgtggtcgatttagatctcgtgtatgtgattgcatttaaagccttatttgtcacaatggcattaaagtttcgatcataaattttcccgcgcggtaccgctgagctgacttcactttgttcttgcttattcgcttggtttttgtaatcatcaccttgcacgatctgcttgatgcccagttccacaataatccaggtaaatataacaaaggcagctaaaaataaaatattcagccggatcggaagcgacttctttttctctttatgattttgcttttttggtttatttctcctcataacatcaccttttctatttacagaaagaaaagacactcaagtaagagtgccagttttcattttaaaggttttttcgacttttttctacagataacccctttttggcaaaaaaattatctctcgccttttaacagggtcggttctgttacccgtttttggccgtcttcttccatggtttcattttccccttctttctccttaaaacggatatccttgacaaagtaataaatcaaaggatgtcctatacccaatatcgcaagtgacaaaggaattcccacatcctctttcagaagggccacaatcaggagaaagcacaaaatggaaacaattctgccggcgttcaagaacatttctctaagcacgatatattcaattcttgcttttctggcatgcctcgcgcgccctatcacatcatatgtaagtgatacatatggcacaagcaacagaggatagccgatggcaataaaaacgccatacgttaataatgtcgaaaagctcatatggaacagaatcaaaaacagcgcgccatacaaaataagtccgcccagcaaaatcgatttttttctcgcctttttcttaatcagcctggatgcaaagtagtaggcaaagaaggaaacagctgaattgacaagaccgaatgtaccgagagcaagttcgctgtttgtctcaataaatacaaacacactgattaaaaagacaaaaatcccttctctcaaaccctgaaaaaaatgcgcattcgtgattctccgccaattcatattgctatggcgctctccaaatactttgctcagcataaaacggccctttgattctctccgttttaagaaaaagctcatcacgacagccagggcaaataaactgagggagagactgaaaatcactgtataacccgtattattttcaagccttgagatcacgaatccggctacaatcgggccgatcattcctgcagaggaagacagaatgcccataaacccgttgaaaaagtctcgtgtatccggctctgttatttcaaaggtcagtacgttaaacgctagccaataaaagccatagccaactccgagcaccgcgccgattagcacgaggcggctggccgccgtttctccggctaaaagcacacttaaataaaaggcagctaaaaaaatgacgccgaaccttaaaatgaataccctgtctatttttttggctaaccgtccagccaaataaaaggttatcggctgcattgtcacaatggataaattatatatcgccaaatcaataaatttccctgactgcttccaaagatacacattaacaaatgtattggacagtgcaattcccagcgagtaaagcccgccaatggtcagcagaaagagtaaccctttgtttacgtctacatcgcctatcactttttttagtttgctcattactgactcccctttactatcccttagtctgtctcactcaaaccgagatatgtaaaaagaagacataaaaaaacaaggtcccataatgaggaccttgtttgtgccattattttgcttcgctgtatagacgagccacttcgtcccagtttacaacattccagaaagctgaaatgtaatcaggacggcggttttgatagttaaggtagtaagcatgctcccaaacgtcaagacctaagataggcgttttgccttctgaaagcggagaatcttggtttggcgtgcttgtgatttcaagtttaccgttgttcacaacaagccatgcccagccagaaccgaagcgtccagctgctgctgctgcgaattgctctttgaatttgtcaaagcttccaaatacactgttaatctcttcagcaagcgcgccagtcggttcgcctccgccgtttggagataaaagtgtccagaataatttgtggttcgcgtgtccgccgccgttgttgcggactgcagtgcggatgttttcaggaacagaatcaagatctgcaacaagctcttcaactgatttgttggcaagagcagtgtttccttcaaccgctttgtttaaatttgtcacgtatgtgttgtggtgtttcgtatggtgaatagtcatagtttccttgtcgatatgcggttctaaagcatcgtacgcataaggtaattctggaagttcgtaagccatgataattcctccttagtatatatgtactgaaatgccgcttcacagcgagcctttcttcattcaatgtaacaaaagaatgctttgtaatcaatgaaaaagctcacgatttggctcatttcagcggacatatttcactttaaccgataatctgccccattaaacctgccgccagcatttcttataggaccgtccataaaaagtatccgatcatcaaaagctgtatgatgccctttgcaataacccctgttaaaaaaccaatgagtgagccgaggccaattttaaacgctgactttaagtccttctgatgaacgataagttctgcgcaaacagccccgataaacggccccaatatgatccctgcaaccggaatgacaaaaggcccgattaataaaccgatcgtgcttccccatatggcagctttgcttcctccgaacctttttactccaagcagattcgacacgtaatctgctgcgaataatactgcggcaaaaactgcctcaacaagccagaacatataagaatacggactgaatgaaaataaaaatccgtacaatacaaatccggcaacaataaatactacgctcggaataacaggatacaccagcccgataaaggcaatgataaaaaccgctgcaatcaacagccaatacaacatatccatagcttccatcctcccattttactctgtcttcttcatgtcttccttgtattcacacgcatgcaacgatacaataagcaacatatattagtttagctaggaagtgaagatagtgaatgtgtttcagcttttcattaaaagtacatactctccccgtgatattgcaaaaacaagatttcaaggaatcggaaaagcgattctttatgtatttttgctctctgtcctgtttgcaatccctaccgcttattatgtaagtacagggaccgtaaaatcaatgaacggctttaaaactgttttaaacaaagatttccctgatttcacaatttcaaacggcaaacttcaaacggatgagaaaaaagccacggaatctcaagcaaatggtttcgttatcgtgttcgatccgacagactcctatggcactgaacaaattgaagcaaagcaaaacgcgatcggcatccttcagaacaaatttgttttggccattgacggacaagcccaagaaatgtcttactcaatgatgccatcagagttacagaaaaaagatgtcattgcagggttaaaccaaaataaagcgatgattgtaactgttctctcagctcttatttttctcgtaacagcagcgggaaaatttattgaagtatcgtttttagcgcttatcgggttaatcattaagaattcgcagaaaaaacatttatcctatcatcagctctggaagctttctgcttattccatcaccctttcaactgtattctttacaatcatgcgggcattagaagcaaccgtaccaagtgaatttttgctgaactggtttgtcaattttgtcatcctgtttctcgttttaaaagagattccgtccaaaaaagctgctgtataaaccgaggctgcattcgcagtctcttttcttttgtcatgaatcgaaatggacaagcatactatggtataaaatttcgtatgcgggaggaaaagcgatgaagcgtctcaccttagtatgcagcattgtttttatactttttattcttttttatgaccttaaaattggaaccatacccattcaggacctccctgtctatgaagcatcagcaaaaacggctgtacaagaaccggcttataaaacggtgaaggtaaagccgggtgatacggttatgtcgatagtcggatcagcaggttctccggatgacattgtaaaggattttgaagcactgaatccaaaagtgaaagctaacgccattcaagcgggaacagcgtataaattcccggtctatccttaatttaacgttaatttcttgtcagttcggcgaagacactgttacaatgtaatttgtaaaataaattcacataaaccatactagaattgttatatctagaagcggcaactacaattaaggagcgattgcaagtgagtgaaatcacacatcgtacaaaaacgcgtcccgtcaaagtgggacctttaacaataggcggcaacaatgaagttgtcatccaaagcatgacaacaacgaaaacacatgatgtagaagcaacggttgcggaaattaaccgtttggctgaagccggatgccaaatcgttcgggtagcatgtccggatgaacgggcagcaaacgccattgcggatattaaaaagcgcatttccattcctctcgttgttgacatacatttcgattataaacttgcgttgaaagccattgaaggcggcgcagataaaatccgaatcaaccccggcaacatcggccggcgcgaaaaagttgaagcggttgttaaagctgccaaagacaaaggcattccgatcagaatcggagtaaacgccggttcattggaaaaacgcattttagaaaaatacggttatccgactgccgatggaatggtagaaagcgcacttcatcacattaaaattcttgaggatcttgattttcacgatattattgtcagcatgaaggcctctgacgtgaaccttgcaatcgaggcttatgaaaaagcggcgaaagcgtttgactacccgcttcacctcgggatcaccgagtcaggaacgctgtttgccggcacagtaaagagcgcagcaggactcggcgccattttaagcaaaggcattgggaacaccatgcgcatttcactaagcgcagatcctgtagaagaggtaaaagtagcaagggagcttctgaaatctttcggcttagcctccaatgctgccacgctcatctcatgtccgacttgcggccgtattgagattgatctaatcagcattgccaatgaagtggaagagtatatttctaagataaaagcgccgattaaagttgctgttctcggctgcgctgtaaacggacctggtgaagcgagagaagctgatatcggaatcgccggcgcacgcggtgaaggactgctgttccggaaagggaaaattgtccgtaaggttccagaggaaacgatggtagaagaactcaaaaaagaaattgacattcttgctgaggaacactacgcaaaacttgaagctgaaaaagcaaaattaaaagaagaaacacaaaaagcttgacgggaacccgtcaagcttttttgtgttagaaaaatggaataataaatattccaagcactaatgaaacgacaccgatacccattgcccaggctccaaggccttgagcacctcttcttcttgcgatatagccgacaataataccggcagctcccaataaaacaggcagtacaaacaatgaaataatggacaaggctaaagcgatatatcctattccccgtccttcattgacattgccgccgctgcgatcattgtcttggtcattgctgcggtcagcagcacgataaggctctgcgatttcagcagctgtttcctcaaaaaaaccgtcattgtcgcgggtaatatttgtcccttcagatccatgatcaacatagtaactgttgttatcacgcttttcgtaatcgtttgccaccttcaattcccccttctgttttattaaaggagcttttatagtttgatccattttgcctgattcatgtttgctaaacttttctgttaatgtcaattgtttatgttacacttgaagggatgaaactgaaggagtgtgggcatgttacgcttaggaatagatattgacggcacaatcacggctcaggatacattcgtcccttatttgaaccgttcgtttaatctttccatttcattaaacgatatgacggattatgatttaacaaagctgttaaacattacccaggaagaattttgggattggatgaatcaaaatgaagcgatcatatataaggaagcattgcttgcacagcatgcgaaacagtcacttgattttctcaaagaggagcacaagcttatttatattacagcgagacggactcatttaactgatattacctatgaatggtttgacagacaaaacattcattatgaccacatcgaactcgttggcggtcatcacaaagttgaagcggtcaagaatcataacatcgacctgttttttgaggatcatcacgggaacgccatgatgattgcgaaagaagccgggataccggtgattttgttcaattccccttataatcagcttccgattgattcaaacatcatcagagtaaacaactggctagaagccgttcaatggatgaacaacaataagcatcacttaatacgtgtcaataactgaaaaaggagcccaaaccgggcccctttttcatatatacgcattttacgcagtagtgttttcttggttttccgctgtacaatcagggcatgtgccataaatctcaaatttatgcccgctgacctgatagccatccaaatcatcacaaagcttgtccatcggacatgattcaatttcctttgttttgccgcaggcaagacaaataaaatgatggtggtgatgggtgaatgaacacttaaatcggaagagcttttcaccggacagctcagttgtttccaaaatcccaagttcttcatataaagaaagatttctgtagattgtatcaaagcttaagcctggataatcatcattcagtgcagacagtacgtttttagcggtaagatatctgtctgaatcagcaaaaagctgcagcatatcctcccgtttgtttgtatatttatatccgttttcttttaataggttcagcgcttcttggacgttcatgaagggtcccccttttcgctttgcttaagaacgtatcacatgtatgaaaaagaaaatggcagctgtctgtccagcaagccattttctttactgcagataaaattatacccataaaatgaataaaagtaaatgaaagcctagtggattgcgtttttgaattttccgcctctcgtttcatgagtattcataattgttatgaatgcattttgatcaacttcaaacacgatcgatttgagctttgtcacttccagccttgtgacaaccgcgtaaattacgtctttttcttcgtccgtatatccgcctttccccttcagcttcgttgtgccccgaccgagacggtgcaaaatcgcgtcggaaatctcatcatactgctcagacacaataatgacagcttttgtttcatcaagcccttggatcacggcatcaatcgttttcatcgcaatataataagtcatgaatgagtacatcgcttgctcaggaccgaacacaaaaactgcccaaatgaaaatgaacacattgatgaacataacgaactcacctactgaaaacgggagttttttggtcagcaaaataccgagaatttctgtaccatccattgaacctccgtttcgaataacaagcccgacgccaaagccgagtaaaagacctccgaacacagtagccaaaataggctgggttgtaatggcttctacatggtgaagtgaggattcaataacggcaagcccgacaatccctataaacgtagagactagaaaggtcttaccgatatatttatatccgaagatcataaaaggaatatttaatatgacaacgaaaaaagcgaaattgagaaaggggtttgacataaagaggtggtctaaaataagtgatacaccgataatcccgccatcaataaaatcattggggattaaaaataattcaatacttacagccgcagatgcagctcctaccagaatcataaagaccctgaaaataaaatgggtaaatgtttctttcttatgttgttttgttggggtcataaaatctcctttcctgcaataactattttaaatacattataaatctattttaccattaaacactgacacattttactgatttgcccatacattaagtctggaggtggaatgaccaatgattttatttcaaagaattattttacagcggcttaatcaggctactgctgatgatttgctgaagtactcaaaacaatacggaatcagcttaacaagatcgcaggccgttgaagtagcgaacttgttatacgggaaaaatgtaaacatctttaatgagagtgaacgaatgcggctgttgaaacaagtagagacgattacatcgaaagaaacagctcaaacagttaatgaactattcaaacaatttacaagctaaaaaatgggggtgttatcccccattttttattgctgtaaaatcttttcgagcaatgtatcatcaaattgtttttctttcagcatgtcaatctcaaaacggtatggcggttttttgttctttttatcttcaccgacatatggtgtttcaagaatttttggaatgtcttttaactgctcatggtgaacaacatattgcagtgcgtcaaaacctatttcaccaaagccaatattttcatggcggtcttttctcgcacctttgacatttttgctgtcattgatatgaagcactttaatacggtcaatgccaatgactttatcgaactcattcagcactccgtcaaagtcttcgacaatgttatacccggcatcatgtgtatggcacgtgtcaaagcacactgacagctgctcattgtgtgtaacgccttcgataatctgtgcaagctcctcaaagcttctgccgcattctgatccttttccagccattgtttctaatgcaatctggacattttgattcggatcaatcacttcatttaagccttcaataatttttttgatgccggcttcagctcctgcccctacgtgagcgccaggatgaaggacaatttgcttcgctccgatggccgctgtccgttcaatttctgaacgaagaaaatcaacacccagctcaaaagtggacggatttgtcgtgttgccaatattaataatataaggcgcgtgtacgataatctcgtcaatgccgttttcttgcatatgtgcccggcctgcttctatatttaagtcttcaattttctttcggcgtgtattttgcggtgcgcctgtataaatcataaacgtattcgccccataagagactgcttcctggcttgctgccagaagcatatgttttccgctcatagagacgtgtgagcctattctcagcaacaggttcccctactttcttttcttagattggtttcttctctgttttttcttgattttctccatctcatagctcattttctttttatacccaggcttaaccttcttcggctttttcacgagacgatgagcaatttcatccgcttcattcggcgtttttttacgctttttgcggcgctgacggtcatcgccttttttccattcgcccttttcaagctctaagtaatcaaattcgatgcccattttttcaagtcttactaatgcatcctcatcagtaagctcataaatggtcatcgcttgtcctgatgagccggcacgagccgttctgcccacacggtgaacatagaaatcgagatcatccggcagctcatagttgataacatggctgacacctttaatatcaatacctcttgcggcaaggtcagttgcaatgatatatgtgaattccaaatcattgatctgcttcatgacttttttccgctcacgtggtgttaatccgccgtgcagcaagccgattttcatgcctttgccagtcagatactgggcaatatggtcagccgtatttttcgtgttggcaaacacaatccccaggtatggattcagatgcgacatgatgtcaaaaaggagcttgtccttgtcacgatgtttcgaaggaatgaggatatgctcgattttcgcagcagtcacctgttttggctccacatgggcgtatttcggattttccatgtatttcttcaagaatggtttcagcttttccggtatggtcgctgagaacacaagcatttgcagatcctcaggcatgcgggaaccgatgtaatctacatctgcaagaaatcccatgtccagcattaaatccgcttcatcaataacaagagattccgctttatgaacacttaacgcctgttctttgattaagtcagcaatccgtccgggtgtaccgacaacaagatgcggctgtattttcaatttatcaattgatttttgtttatcagtgcctccgataaaacatttcgagcgaatctgactgccttcctcaccctgcgtgattttaagcgcttcctgataaatctggttggctagctctcttgtcggagccgtaatgactacctgaacgacatccttagcaggatcgattttgtttaataaaggcagtaaataagcgtgagtctttccagtacccgtctgagactggccgatgacgctttctttttttaacactgcaggaatcagccttttctggatatcagtcggttcgtaaaaaccaaggcgatgtactgcatctataataaatggtttcaattcataaagttcaaatttcgtttctttcatttttcccagctccttaaagcggcacattatgtgtccatcatcacattatacccgattttgcttaaaaacaccacgtttgcaaggcgtttgttttattcagttatgtaaagcaaataccgcagcccatgcatattctaatagcagagagagctgaaaggaggtacaagtatgttttcaccgcagcagccaatgagaaattacccacagcccggaccgccccgccccatgccaaatcagcgaatgatgggcagaagaccgcctaatatgcgaggactttcatttggagcacagcagcaaggttttcagcaagccggacaatttcttcctcaggcaaatgccggagcgagaaatggtgcaggtgcaggcggaggcttaaaaggaatgctgtcaaggttcctacccggcggaggaggcgctggcagtgccggagttccaggagttccaggagcaggtgccgcagcgagcggaggtgctggcctgcaaggcattcaaaatatcgccaatcctgcatcattatccagtatgcttggaaatgtgcaaaaagtactcggcatggcgcagcaagtcacccctatgatccagcagtacggcccattagtccgcaatctgccagcaatgatgaagctgtacagccaattaagtaaaagtgatgatactgagacagaggccaatgaggaaagtgaaaaacaatccgtttcagaagaatcatcagaaaaagaaaaagagactgaaacaaaaacctcagatgggaacaaaaaatcaaaaccaaaaagttcttctctcccaaaaaaatctaaaacaactgacaataaagaacaagaatcaaaaacatctgcctcgaagaaaaaggaagctgcctctcctgctccgaaaagaacatcaggcagttcaaaaccgagattatatatttaacattctttgatatctgaagtgagattggctataatgagatcagaagaatgcaagaatagagccgtttgattacggctttttatattgcctttactcacttcagtattggaggacaaccgaaaatggacgtaattaaaatttcaccgcgcggctattgctatggtgttgttgatgctatggtcattgccaaaaatgcgtcactagataaaagcttgccaagacccatctatatactcgggatgattgttcataataaacacgtcactgatgcgtttgaagaggaagggatttttacattggacggctctaaccgtctggacatcttaaagcaggttgacaaaggaactgtcattttcactgcgcacggtgtttctcccgaagtcagaagaatcgcagaagaaaaagggttagtcgcaattgatgctacatgtccggatgtgacgaaaactcataatctaatcttagagatgaaagaaaaaggatatcacgtaatctatatcggcaaaaaagggcatccagagcctgagggagccgttggcgtagcgccggagatcgttcacttagttgaaacagaagaagatgtaaagaaccttgatatccaagcagagaagttaatcgtgacgaatcaaacaacaatgtctcaatgggatgtccacgacattatggagcttgtcaaagaaaaatatcctcatgtcgaatatcaccaagagatttgcctcgctactcaagtgcggcaggaagctgtatcagagcaggcaaaaaaagcggacttaacaatcgttgtcggagacccgaaaagcaacaattcaaataggcttgctcaagtgtcagaggaaatagccgggacaaaagcataccggatcggcgacttaagcgaattgaagctcgaatggctgaaaggcgttaataccgttgcagttacagcgggagcttccacaccgacgccgatcacaaaagaagtcattcgctttttagaacagtttgatcacgaagatccatcaacttggacaactgaacataatataccgctcaaaaaaatacttccaaaagtaaaagcaaaaaactgaggctgtaaaagcctcagtttttttatagaaatgtaaatggatttgtatctgtttcagaaacaaagatattcacgtcaaactttttatcattacacattgatgtcagctttctcgtgacgccttctttcatgattttttccgcatagtgtcccggatcaaccacatttaggccaagcatcatggcatcatgggccacatggaagtataaatcccctgtgacgtaaacatcggctccctttcgttttgcatgatgaatatacttgtttccatctcccccaagaacagctacctttttcaccatgctgtcagcatcccccaccattctgacaccattgacgtcaagcttgtctttcacaaataaagcgaattccttgagcgtcatctcatttttaagggttccgacacggccgagtcctttttcggcaggagtctgttcaacaggatagatatcgtaagcaacttcttcatatggatggctttttatcattgcattgataacagctttttcgacgcttttaggaaatacagtctcaagccttacttcatgaacaagctcaagctctcccacttcaccgataaaaggcttagctccgtctaatggtttaaaactgccgattccttcagatgaaaacgcgcaatggctgtattcaccgatatggccagcccccgcatttccgagcgcggctctgacctgctcttcatattccttcggcacgtatactgccagctttttcagaggatccgtataagtaggcaccagcacttccgtctcactcagctctaatgcttcagcaagcaaatcattcacaccgccgtccgcaacgtctaaatttgtatgagctgcataaacagcaatatcatgcttcaaacacttttcaattaaccttccggcaggctgatctgttgaaatatgctttagcggccggaaaattggtggatggtgtgcaataatcaagtcaacctctttttcaatcgcttcatcgataacgctctctaacacatcaagtgtaaccatcacatttttaattggtttgtttaaggtgccgatttgcaggccgattttatctccttcaaccgcataggctttcggggaaaattgttcaaacagctggatgatctgctgcccatttacacttttagccatgatcgattacctcctttaacagctccattcgatcggcgagctcctttaatttttgtttgttttgctctgtatccgccgcttggctgatctgttcataaatgctttgagtgtgctgaagctcttgtgtccactttttcaaaaagacagcatttttttcttttgccaagaaagggccaacgagcatcccggctgataaagaaataccgtcataagccgcatccctgtctcccgcttctgccaccagcacctcatagcactttccgtcctcttcaaggattacctcatctatcagcgcatatctttctttataaagccactccctgatatgaacagcatgaatattcggctgtaaaatgagccgttccttccccgttaatttgtctttgcccgcttctaaaatatgagcgatcaaagatccgcccattccggcaatcgtaatggcatcagcttcaccttttttaatcacttccagtccgtctccctgccttacagaaatgtgcgagtttaagcctgatttttcaacctgccgctttgcagacaaaaatgggccgtctgttatttctccggcaatcgccccgctggctttatgattcagcaccgcaaaacaaggaaggtaggcgtggtcagagccgatatcggccatcaccgctccattcggtatgtactccgctactgtttgcaatcgtttagataattttaattcgttcacttgtcatcacaacttttctcaatcattttttcctttactatcatataaaaaatcagcccggaatccaagctgaagcaaatgattttgaaattatttcttttgatgggggtctgcacgcggcagtcaaaaataaaaggctgtcgagaacatctcggcggcctgtgaatgtataaagagaaaaatggttcttttatttaatttttgacacccactctgccatatcatccagcttatcggccggtacaagaccggaaggcattccattaccgcctttttcgatctttgttttaatttcagcgacatctttcttatcccctacaccttttaagctaggacccgaaacaccttcataattttcaccgtggcatgcgatgcagtttgccttgtaaatttcttctggtgaagcgtttgcatctttcttttcagcagatttgctttctcctccgcttgcaatctcccgagagtcatcaagtccttttactgataaaaagaaagttagaccaattcctaaaacagcgatcagcaaaaatggaataagcgggttccatttcatttcccttccccctttttgatccttccccctatgtaaacacttctaattctaacttatttttacaaaaagtaaatggattgctatacaaaagttttttattcacactttatacaaaattgaattgaaacatgcctaaatctctaatatcctttttattctattgtataatgtattgtatacgcttacaatagaaaatatggaattagattttgaaatttttcaccacaatgttcatttgcaaatgacatcatttttcagtaaaataaaggcatattatccatatatctttttaaaaaaaagaagaacggatcttcaagacccgttccatcttattcaaggaaatctttcaaacgtttacttctgctaggatgtcttagtttccgcaacgctttggcttcgatttgtcgaatacgctctctcgttactccaaatactttgccgacctcttctaatgttcttgtacggccgtcatcaagaccgaatcgaagacgcaatacattttcttcacgatcagttaacgtatcaagcacatcttccagctgctctttcaatagctcgtatgcggcgtggtcagaaggtgaagttgcttcttggtcttcaatgaaatcaccaaggtgcgagtcatcctcttcaccgatcggtgtttccagagataccggctcttgagcaatctttaagatttcgcgtactttttcaggcgttaaatccatatcttccgcaatttcttcaggtgttggttctctgcctaagtcttgcagtaattgacgctgcacacggattaatttattaatggtttcaaccatatgaacgggaatccggatcgttctcgcctgatcggcaatggcgcgtgtaatcgcctgtctgatccaccacgtagcatacgtactgaatttataacctttgcgataatcaaatttttcaacggctttcatcaggcccatgtttccttcctggatcagatcaaggaacagcataccgcgtccgacataccgttttgcgatactgacaacaagccgcaggttcgcttcagccaatctgcgtttagattcttcgtcaccttcttcaatcttttgagcgtaggcgatttcttcttttgcagaaagaaggttaacccgaccgatttcctttaaatacatacgaactgggtcattgattttaacgccaggcggtacacttaggtcattaaggtcaaattcttcttcggctttggcaagctgctgaatattaggatcttctgtttcttcattctcactaattaattcaacaccttgttcacctaaaaattcataatactcatccatttggtctgattcaatttcaaagctggacatacgctcagcaatttcttcatatgtcaaaacgccacgttttttaccagactctgttaattgctcttttacttggtcgaatgttaattctgtctcgtgggtttgtttatcagccattatggatccctccttccaaagcttgcaacgaattctataagcggtatgattcttattcggtccattcaggcgttttctatgtgaactgcctttaacaatgtgcgaataatgaaatgacaattcatgatgaggttaagcgatctatttgctcctccgcaaggaatcattgccaataaatgctcctcatcagttctccagttattttaaagatcggttcaatgtaacgatttcttgagccagagaagcagctcttaaaaaatctttttgcctttcggcttcggctctttccgcctctttttcttttatcattgaccaatttctttgattcaacactttttttacataatctgataactcggcttcgctaagctcttgattaacctgaagcattaatatatcggacaagagctggcttatatgatcatccgtcaccctggccatcagatgctgaggcgtcagctcggctccctcttcataaaaagcataaagataagcggctaatgcccggtgctcatcaatattaaattgaaaccctacccggtcaatcacttttttgatgacgctccgatctcgaagcatgtgagcgagtaacagcctttctgcattttcatacgccggacgcaaacgtttttgccttgcttttgtcgtcagatgcgctcgccgcgtttttgtttcaccgctattgtcagcaggtttgttttgcttgctgaaaacagacagctgctcagttaaagactcctgtgaaagcgaaaactctgaagcaagctgctttacatagacttcctgctctagagaccctgaaagcgtgctgatttctttcagtacgtctttaatgtaagctaggcggtcgccttcatcggacaggttctttccttttcggaaatattgcattttgaacgccattacggtgacacttgcgtcaataatgtcgtttttaaatttttccccgccgaattttttgatgtaatcatcagggtccaatccgtcaggaatcattgcaactctgactttgcagccttttttttgcagaagctccgaagcttttaaggtggcttcataaccggctttatcagagtcatagcaaagaatgatttcttcgacgtttcttctcaggatcttgacatgatcatctgtaagagacgttcccatcgtggctatgctttcctttacacccgagcttacggccgatatgacatcagcaaacccttcaaataagactgctctttcctgctttctgatatgaaggcgggccttataaaaattgtaaagcagtttgcttttatgaaagagcggggtttcaggactgttcatatacttaggctgctggctgccaagagccctgcctgagaaagcaacaacagccccgtgatgatcatggatcggaaacatgacacggtttctgaagcggtcgaaatatccgcttccgtcttcgcgtctgatcaggagacccgctttttccatttgcgcctcactaaatcccctctttacaaggaatttcgtgataaagtcccaagaatcaagagcatagccaatctgaaattcattaatcagctctttcgtaaagcccctagaaagcagataatccagtgcctcttgaccttcttttgtatttattaacaaatgatggtaaaatttcttcaggagctcatgtgcctcagccattttttgttctccagaagactctggccgggctccggaatggactgttatatcatctggaaaatcaatttggtatttgtcagcaaggtgagaaaccgactcggcaaaagaatagccttccatctgccttaaaaaagagaaaacattgccgcccgctccgcagccaaagcaatgaaaaatctgtttgtcgggcgatacggaaaacgaaggtgtgctttctccatgaaaaggacagagtccaaagtagtttcggccttgcttctttaattgaacataatcacctatgacttcaacgatatctgccgacttttgcacctgatccacaatttcatctggtatccgatttcccatcttataacactccgtcgtacattattcgatgctttagtgcaaaatcccttcatcgttcgacaggattttttgcagcagtgtaataaatcgttctcgatcttctttattcaattttttaggccctttggcatatacgccttttcttctttgtttgccggaaaaatgacggccctctagggcaaaatcaatcgtgtcttccttgtaaagacgacctctttccgacataacagagacatttctgttcaacagcagagatgctaatccgatgtcctgcgtcacaacaatatctcccggtttcacgtgatttgcgatatataaatcagcagcttctttatgaggatcaacatacttccatttttcttcattgcttctggaaagctgataatgttcaaatgaagcgacaaaaagaacttgaacttcatactcggatgctgtttgtaaaatttcatcttttaccggacaagcatcagcatcgacaaaaatcgtcttttcttgttcattaagaagagtaattctccatccctccattaaactcctgcataaaagcaagcaaaatcgcacatcctttattattgtggatgtatatgaatttgtcgaaaaatttccgggagaaattcttgacatcttacccataatagtttattcgtatcacacgatccttaaacctaaaattaatcattttatcacaattttttattataatacaaacttcacaaagatgctattgtttttcattattcccttttggcacagccaaaaacccaggatagagcgtcctgagttatatgttttttgttttgagatgatggataatatttgctgtttcctcaaccgctttatttgaaacatcaacaacctggcagccgatccgatccacaatcttttcgaaatactcgagttcctctttgattctgttgatatttgcataaatcgctttatcattaagcccgagtgattttaaacgttcttttctgatatgattcagtttatcagggctaatctttaaaccgatgcattttttcggatcaacgttaaagagttcttccggcggatcaacctccggtacaatcggaacattggcaaccttcaggcgtttgtgtgcgagatattgagacagcggtgttttagacgttcttgacacgccgatcaaaacgatatcagcttttaaaatccctcttggatcacgtccatcatcgtatttaactgcaaactcgatggcctccacttttttgaaataatcttcatcaagctggcgcacccgccccggttcgtatttcgctgttaaaccgtaggctgtttccattttatcaatcaacgggccgataatatcataatataaaacatttgctttttccgcttcggctatcaaatattctctgatttccggcaccacgagtgtaaaacagataatgccgcagtctgcctttgcaagtgaaatcacttcattgatagtgcctatatcttcaacataaggaattcttcttacatgagtatcatccgccgatccgttaaattggctgagtgctgcttttactaccaattcagccgtttcaccgacggaatccgatacaacatagatgatgcggttattcatattatccccccgttagtttgcaatcttataggatttcattttcagataaactgacaagtattttggtcatatttgtttttgtcactctgccgatcacttcaaagcctttatcggtgtctttgatgacaggcagtgcatcaatttgtttttctattaagtgctttgcaatgtccatcacataatcctcgcgtctgcacaccgtaatgttcggcatccttgtcatgatgatgtgaacagggaccgatgtaagctcctgctggccaatgctcgctctgagcaagtcttttcgtgaaagcaccccgactaaaacagcatcgcggtccaccacaaacagagtacctacatcttctaaaaacatggtgcaaatcgcatcgtacacagaaacgttttcgtgaatcactacggggatagattgaaagtctttcacctgaagctttttgagtttatccgccaaaagctgtgtgccggtttttcccgtatagaaataaccgactctcgggcgcgcctcgaggaatcctgacatggtgagtatggctaaatccgggcgcaatgtcgccctggttaggttcagcttttctgcaatatgctcccctgtaatcggcccgttttcttttacaatctgcaaaatatgttcttgccgtttatttagttcgatcgtactcaccaccttttcacttcatagctatgtaaagaaataataatccatattataacgtaaatatcttgtaatcaaacaaaaaacttataaatggggaaaagacgattaccgatcacacagcaaccgccttttctctctttattttacaataagggcattcatattcgcaaaggacttgatctcatccgccaagcttaccatttgcgctaaacgatttgcctttaatgactcattatccgctataaccattgtatgatcgaagtaagcatcgatcggttcttttaaggctgcaagtgaagcaagcgccgcctcataatcttttttgctgaagttttcctgcagattttgcttcgctgtttggtaggcatcaaacagttttgcttcgtattcattttcaaacagatcaggctgaatgtctccgcggactccttttttgctgatagagatcactcggcctaacgcttcggctgtttccttaaagccaggtgcaccaagcttttgctccagtacttgtgctttatgcagcgcagagtacggctcaagctcagagctttccagcacggcgtcaatgacatcatgtctgatttgttcagcattcaagacatatttcaagcgctgagtgaagaaatccagcagttcattttctttatcggtttgaacgaaagtaagcagctcttcaaatgaaattccccagttgcggtcaagaagaatcgcaacaataccgcttgcttggcggcgcagtccgtaagggtcctgggaaccggtcggaattacgccgatagagaagaatgaagcgattgtgtcaagcttatccgccattgctacaacagctccggtgaaagtagaaggcgtttctccgcccgctgatctaggcatataatgttcattaactgccgcagccacagcttcatcttcgccaagcattctcgcatacttttcgcccataattccttgaagttcagggaattcatatatcatatgcgtcacaaggtcgaatttagaaatttcagcagcccgcttcacatgttttaatgtatcttcatcagcctgaagacgaacggcaagtttctctgcgattgatgtgactctcctaaccttatcagcaagagaaccaagctcttcatggaaaacgatattttcaagtttcttcacatttgcatcaatgtttagtttctgatcttccttgtagaagaatgaagcatcagataaacgtgcgcgcagcactttttcattgcctcgggccacattttcaatcgcgtggctgttgccgtttcggactgtgataaagtgaggcagcaggtcaccgtttttgtctttgacagggaagtagcgctgatgctctttcattgttgtgacaagcacttcttcaggaattgacagaaactcggattcaaatgaaccgtaaagagctgtcgggtattctactaaatgattcacttcatcaagaaggtcttcgtcaactggaatgctccaattgttttcagcagccattgtttccagctgagattgaatcatttgctttcggacgctaggatcagcaataacatgctgttctttcagctgctcttcataagctgaaggtgattcaattgacgcttcatgtccgaggaaacggtgtccctgtgttgtccgtccagactcaacgtttgtgatcgaaaatggaatgacatcctgtccaaataatgcgacaatccatttgatcggtcggatataacgcaaatcttcatttccccagcgcatgtttttcgggaaatgcaagcttgtaattaaaccgctcaattctggcagaagcgacttcgtttcttggccggcttggaatttttgcacgaatacatactctatgccttttacttctttgatgtacaggtcttccacatttgcgccttggccttttgaaaagccgattgccgcttttgtccagttcccgtccgcatcaagggcaatttttttcgcaggcccttttgcttcttcttttatatcatcctgcttttctgcgacatccttaacgaacacagcaagacgtctcggtgtattgaagagtttcacttcaccgtgagtaatatttttttctttaagccagcctgtcagcttgtcgccaagctgaaccatgctttcattcaaaaagcgcgccggcatttcctctaatccgatctctaaaagtaaatcctgtttactcatgagaagaaccctcccctttaagcattgggaaccctagtttttctcgttcctcatagtaggtttttgctacttttctagctaaattccgcactcttgcgatatagcccgtccgctcggtaacagagatcgcacctttggcatcaagcaggttgaaagtgtgcgagcatttcagcacatagtcatatgctggatgaacaagtccgttgtccatttgcttgatcgcttctttttcatatgtgctgaacaattggaacagcatatcgacgtctgatgtttcaaacgtataaacagaatgctcatattcagccatcatgaataaatcttttactgtaaaccctgacgtccattccaagtcaaacacgttttctttatcctggatataagacgcgagacgctcaattccatacgtaatctctacagaaacaggtttacactctaatcccccgacctgctggaaatacgtaaattgtgttatttccattccgtcaagccaaacttcccagcctagacccgcgcagcctaaagacggattctcccagttgtcttcaacaaagcgaatatcgtgctcaagcggatcaattccaagagcacgcaaggaatccaaatacagctcttgaatgttatcaggtgacggtttaataatgacctggaactgatgatgctgatacagtctgttcgggttctccccgtagcggccgtctgccggacgtctggaaggctctacataagccactttccacggctcaggaccgatactgcgcaaaaatgtatacgggctcatcgtgccggctcctttttctacatcgtaagcctgcataagcacacagccctgactggaccaatgcttttgcaaggttagaatcatgtcttgaatattcatttcaagcacctccacttttctttcataagttgactgcgacagcaaccaaaaaactcccgtctctatgcttgccagccgcaaacatagggacgagagttctcccgcggttccaccctagttgctgagaacaaaatcccagcctcttttttaaaattgctcaagaatgcctttcgttgcgtgctcatccttagcttccaccgccctaaggtcgctttcatgaggtaaacgcaagtacttctttctctcactgcaacatattttataataaatgatcatataaaaagatggaccaaaagtcaacttttgttttcacccataagatgtttcatgctttccatttgatctaaaaagcgctttgattttaaatacaatcccgaatattcttcgtaatataaatcaatcacttgctttaattcagcttttgtttcctcttttaaggacacattgccgagcctcgacagatcaaaatagtaaaagagtcttaacagccttgccgtttgcggtttgatcggtatcctgtaaggatctttttcaaaacagcggtggcatataaaaccattatcacgaacagagaaatgaaaggttccgtcttggcttttacaatgtacacaatgatttagctcaggatacaggcccatgacaccgagcatcttcatttgaacaatgaaggtgataacatccggatctgttccttcattcagctgttttaatgactctaatatgaattcaaataaataaggatttggctttttttcttctgtgcctctgtcgactaactcagcaatataggcagcatatgctgttaaaaacaagtcttccctgatgcctctcatgctgaggatcatttccccctgctgaagcgttccgaggcccgatgttttttgcattaagaaagaaccatacaaaaagggctggctgactgctgataaacggctgttcggttttttggcgcctcgtgccataacacctatttttccgtgttctcttgtcagtaaagttacgattttattcgtctctccgtaatcatttgtgcgaagaacgattccttcacattttgtcagcatttccgcaccttcctcaagcaggagcggccaagaggtttataaaattggataatcaaatcgggctagctcatcttctagttcttcgggtctttccatgttctctttttccagttctttaaaaagaagatacgtatcaacatttcctgtttgagaaaatacgttccaggtaaaattcaacacaagaaacccacctttctgtagttaaactagcttacctaaactccaaattcttacctttatcttgaccagatgtcctccatttcatgttaaacaaaatttgctaatgtatccctgttcctgtgagataatgacacacacagctagagattaatattcgtcctctttaaagccaaaatcgcgaagctgggacattttattacgccagtctttctgcactttcacccacaattcaaggtagacacgggagcccaacagtgcttcaatatccgctctcgctctttttccaacctcttttagaaggcttccttttttaccgatcacgatgcctttctgggaatcccgctcgaccacaatcgttgccgctacgtgcacagaaccgttgtcctgccctttgatggattcgatggccaccgcaatgctgtgcgggatttcttctctcgtcaaatgcagcaccttttccctgattaattcagaaatgataaatcgctcagggtggtcagttacctggtcactcggatagaattgcggcccttccggcaaatacgcttcaatctgagcgagcaaggtttcgatgttatttccttctaaagcagaaatcggaacaatttccttaaaaggataacgtttgcggtattcgtcaattagcagaagcaattggtcgggatgaattttatcgattttgtttacgattaagaatacaggcgtagacatcgtctgcaatttctcaatgatgaattcgtcgcccttcccgtagccttcctcagcattgatcataaacaagatcaaatcgacttcttttaatgtattttgcgccactttcatcataaagtccccaagtttatgcttaggtttatgaatccctggtgtgtcaataaaaatggtttgtgatgtgcctgtcgtcagtactccttgcaccttgtttctcgtcgtttggggcttatcgctcatgatcgcgattttttgtccaatgactctgttcaaaaatgtagattttcctacgtttggtcttccaataatggatacaaatcctgatttaaagctttcgttcgtcatgtaaatcctccgatgaaaatgcgcctggcaataattcttccacagtcatttcttttatttgtccttgtaaattagtcagtacgacaataacgtcttttgtgcaaagctcagaaatcacctgtcggcaggctccgcacggagatactggtccaggggtgtcagccgcaacggccagcatctgaaactctgtatccccttcagaaacagctttaaataaagcggtacgctcggcgcaattgcacatgctgtatgccgcgttctcaatattgcagcctctgtacacttttccatccttggtaagaagagcggctcctacttggaatttggaatacggcgcatatgccatatcacgcgcttttaaagcttctgttattaattcttgtctgttcatgtgtacattcctctcttacctataatggtaccgctatcactttatattttacataatcgcgcgctttttttcacgcccatttctaaaaatgtaaaataaatgtaagaattttcagccattacagctttggcaaaaaaataagtaaaccaatgatacacgaaatcacggcaaaaacgcaaacagccccggcggcagcgtccttggccgctttagcaagagggtgatgtttgtcagttattaaatcaaccgtatgttcaatggctgtatttaaaagttcaagcgaaaacataccgcctatcaaaaggaatataatcatccactcaatcatgctgagctctacaaggaagccgcaaatgagaacagcgcaggcggctgcggcatgaaattggaaattccgctccgtccgcgctgtttcccatatgccccggcctgcatgcacgaagcttttgaagaatcgattcagctcatttctatgatcttttgagtccataagcgtccagcaattccttttgcttagtaaacatctcctcttcttcctctttcgtcatatggtcatatcctaaaaggtgcagaaatccgtgtacagctagaaatccgagctctcttttaaaagaatgattatactcctctgcctgctctcttgtgcgatcggcactgatgataatatcacctaaaaccggaggcatttcggcgcccacgatttcgatctcgccttccccctcttcttcaagagcaaatgagatgacatctgtcggagcatcctttccccggtattctttgttaatctgatgtatgtcatcattggaaacaatcgtgacagaaacttcagcctgatcctgaacgccttcacgctcagcggcaaattgaagcagattttctacttctttgagcatctcttctgagacgcttcccgtttcatcaacgatatcaatcagtaaactcatctatttcaccttcttagtagcctccggatattcaatccgggagtggaaaattccttttaatgttgcacagagcgtttttgcgattgtatccagctctttaaatgtcaaatcgcattcactgaactgtccgtcctgaagcttatcggatataataccccggacaagcttttcaattcgttcaggatttggattatgcatggatctgacggccgcttcaacactgtcggccactgatataattgcggcttcctttgactgcggcttcggccccggataacggaactcttcctctgtaatctggtcgcctttttccttcgctttatagtaaaaaaactttaaaagcgaggttccatgatgctgctcagcaatatcgacaagctctttcggaaatttatagcttctcagcatattcgcaccgtctgtcgtatgcgagataataatatttttactcaactgaggtgacagcttgtcatgcggattgtcaatattcatttggttttcaataaaatattgcgggcgctttgtttttccgagatcgtgataatatgcgccgactcttgcaagcaaaccattagccccaaccgcttcacaggctgcctctgataaattggcaaccattacactgtgatgatatgtacctggtgtttctgtcagtattttgcgcaatagcggatggttaggattagacagctcgagcagcctcatggtggataaaatgccaaagcccgtctcaaaaaacggcatcaggccgatgatcaatacagatgaagcaaaccccgacacaacccccatgagcattaacgtgccgatttcaagacccgacagcgcagtgttctggatcaataataaggatagaacgacaaccatattaataaacgccacgaaaagtccggtctgcaaaatctttgatcttgcattgtgttttcctaaaaataatacacctgaaatgccgctgatcaaataataaatccctatgacataattgaatgttcctgtcacaccctgattaaacatcatacttccgcaaatcgcaagaatgatacttcccaaaatggcaatgcgttcattcatcagcagtttgattaagatggcgcctgccgcaatggggaccagatagccgatattattatactccatcttctgaaacaaactgacaacctccatgatcacaagcaaaagtgttgtgataatcgagaataacagaatggattggtttttaaacttcagattttgtttctgtttttcaaaataatatacaagtgttgcaatgaaaagtccgatcataatcaatagcccgctgatcggtttaaagagatttgagttatttaataacccagtcagctcaagtttcctgtacacttcccgatcaatgaggtcattttcttccacgagcacttgcccctgtttgatttggacctgctggacattatctgaggcttcctgccgttttgcctctgttgctttcggatcgaaaacgtaattcggaataatagcaaaacgcccgatttctgtcgcagctcccaagtatttagacggaatagaattgctctttagctctttttctaccttatcctttgcatcagatagtttatccgaggggatttcactgctcatgaccgtatttactgcggtaatgaccgtatctctgacaaaagaaaagtcttcactgtctgctttcagcaatgtcttgatggaatcctccgatatagaatcattcacatctgatgtcaatttgtcctttacagatttgaccattgatttttccgatggtgatttactgccttcctccgatgattttttcacttcactaatactgtcgaatattgatgacacaaggtcaatccgattgtctgtatattctttttttaatgtatattgatcttcaaccgcgtcctcagcggcttgctttttttcctctgtggctttttgatcttctacggttgccggagcgtaaatggtcttgtcgctgactgaaaacaggtctaaatcaagtgtttccggcttaacatgtacaaagagcaaagcaaacataatggcagccagcagaagatacagcagtacatgcatggagcgggcatttttaaaactgctccattttttcgagctgcttttggtcttagccttctttttcaacacaagaacctcctcttgaaacatcaagcccataagcaatcataaaaatgacccgataacgcgcgatcgggtcattcagcattaattttgcttatcgtatgcttcaataattttcgcaacaagcggatgtctgaccacgtctgtctggtctagctcaatcatagaaatgccgtctattcctttcagcatctccttcgctactgcaagtcccgatttgacgcctttcggcagatcaatttggctgacgtcacctgtaatgatcattttagagccaaaacccagtctcgtcaaaaacattttcatttgagcaggcgtggtattttgtgcttcatcaagtataacataagcatcatcgagcgtccgccccctcatatatgcgagcggagcaatttcaatgatgcctctttccatcagacgttctgtatgatctgccccaagcacatcatggagagcgtcatacagcgggcgcaaataaggatctactttttcttttaggtcacctgggagaaaaccaaggctttcaccggcttccacggcaggtcttgttaaaatgatttttttgatatgtccgttttttaaagcatggactgcttttacgacagccaggtacgttttcccggttcccgccggaccaatgccgaatacaaggtcattccgcttcatagcggccacgtattcccgctgtcccattgtttttacacggattgatttgccttttgcgttttttgtaatttcttcttcatacatgctttcaaagtattcaagttcattcttctttgccattttgatggcgtaaatcacatcacgttcagagatctctatccccttgcgaattaaagcgaggagcgatcccagcagcctgtctgcaatctgaaacgattcatcatcgcctgacacataaatcgtctcgccgcgcgtaatgatatttacattcagatctttctccatcaatttcaaaaaagaatcttggttcccgaagagtgaaagcgcctcgtccgggtttttcagtttttgattcatcgcaagtaaatgttctgtcattcttcagtctccctgacaataggtgtggtttgaacgatatcttctataacttggtagagaataatcaactttactttaccattctcaacagtctggtgcaaaactttttcacttttcacctcgccgttttcgcctattttatcctctacatcctgtttacccaatttaatgccttcttgaactgcttcttctttcgtatattttcgcaaagcctcttcactttctctcgtttgctctttgacataggatacagggagcttaaatccgagaaaatgaagcgaatgcttttcttgttctgtttttggatgcttcaattcctcttttttaaacgtcatcccccagatcgggattgccaaagaaccaaaagaaagcttgtgctttgtccttactttgcccgtatagacgttaaataatgtttcaagcgggactgtcacttctgatctataccaggtttctccgtaaatttctgcttttgaggcgacttcctgctgatggtcttcgctgccgatcagtcccgaaacaagcagctgtcccttttcaacatgatcgtgtatggcggccatgggctgtcctttttgcacaaacattctcgtaatggttgctttctttttggcgacaatattgcgcgggctaacatatttttctttttcgggctcatttttctccacaactttcatatgaatggtcgtccccttcagatcaactccgacccaagtgatattgtctattccattggttaatgatttctgtattttttcgggcgacatcattaaaaactgcagacggccctttttgacgccgatttcattaagatgctgcctcatttgatgttctgtttcaggcttagcgcctgtcacatcaattttccacaccatattggacagcaaaaacaaaagaatgaaaaaaatcgcaaaaccgatcgtaaaccctatattcagctttgatttcagcaacaggaagggaaatcccttccgattgataaatcgggctttacatttaaatttacttcttacccgccgaaaggcatgtacatcctgaagctgtatatataacgatacggcttctttcttttttttgacatgaaagaccggaatcccctgtcttgtgcattcattaaggagccgctcaatccctcttcccgtcaattcaagctggaccttacccgaaaaaaaagacagccatttatttttcacaacatttccccctcggctttatgactcaacatatcgaacgacatcaatcgtaccctccaaaagtatctcttccggaagaatcgccttgatgacaaaatttttaccagatatgatgcactggccctgcttcagcatcagccgcacttcattctcactgaaaagcaaaaggcctctgtggttttctatgtagatatgaagtctgccaaccattgtaatcctcggcagatccatcataacgtccgggggaatttccaatgctcttgtcagccaagctttcatacgattctttctttgccccatacaaaaagaaccccctttcatctcatatgtatgatttgaaaggaggttctaacactttaatttttacgggccgggcgcatcgtacggtgaggttttttcgcccgtggaggtccgaacacctctcctagaacgatcccctgtacgacggtgtctttattcacctgaagcattttttgttttgtgtatactgttttttgtttggcagcagcaagatctcgttccagccctttcaggtttcttgctgtttccctgcgtctttcttccgcttcccgtcttgcctgttccatacggttagggataggtgcaggggcatcttcttttgactgcttcttttgaggagaagcagattgcatgtgttgaggttttttacttttttggctgttttgcttttcttctttgctctttttgccgaaaatcgcagaaatgattccgatgatcgctgcaataataagcggattggtcagtaaatcttccatcagcgttctcccttcttagagagattatgatttgcggtcttcatccgaagggtctttcgtcagcttgccgaatgaatcacgcatttctgtgtcagcatcgatgttcttgatattcatgtaatccatgacgccaatattcccttcacgcaaagcttctgccatcgcaagcggcacttccgcctcggcttctaccactttcgcgcgcatttcttctacgcgggcacgcatttcctgttcttgagcgacagccatcgcacgtcgttcttccgcttttgcctgcgcgatgtttttatcagcctcggcctgatcggtttgtaaaattgccccgatgtttttgccgatatctacatctgcaatatcaattgagagaatttcaaacgcagttcctgagtccaatccttttccaaggactgtctgagaaatcatgtcagggttttcaagcacttttttatgattatcagatgaaccgattgtagaaacgatcccctcacctacacgagctacaatggtttcttcccctgctcccccaacgaggcgctcgatattcgctcttactgtgattctcgctttcgctttcacttcaatcccgtccattgcaacaccggcaatgaacggtgtttcaatcaccttaggattaacgctcatttgaacagcttccaacacgtcccggcctgcaagatcaatggcagcacagcgctcgaatgtgagttcaatgttagctcgctgagcggcgataagcgcgttgacgactctgtcaacattacctccagccaggtagtggctttcaagctggtttgttccaacattaagtcccgctttatgggctttaatcagcgggttaacaacccgattcggaatgacacggcgaagcctcatcccaactagagtgaaaatgctgattttcactccggctgccaaagctgaaatccaaagcattacaggcacaaatgtaaaaaatactgccaaaacaatgatcgctactgcgacaattgccagaatcataagtgttgacggatccatataacttctcctcgtttctatttaaatttctctcacgacaatgcgtgagccttctactttaatcacttttacttttttatctttttctgtaaacgatccctccgaaacaacgtcaaggcgttcatcatcaataatcacggtaccggaaggacgcagcggtgtaaaggttatacccacttttcccattaagtccgtgcgcgtttgatttgaaacgtagccgctctccgtgtttgtagaatcatttaatatcaatttcttaaagaatttcatacgctttcccaacacccttgtcagtaaaataaaagctgtaatcgaaacagctgaggcgatcaagagagaaaccgccatgacagtgaagctccccgcggctaaaaacaggctcgcaataatcgctcccaaacccagtaatccaatgattcctccgggaagaaaaatctcaagcagaatgagaatcacccctgctataaagaggagaaccgtctcatacccggcaaggccggctgcaagatgcccgtaaaagaacagcaataacgcaatgagtccagccgttccagggaggccgacacccggggaaaaaagctctaccgtcagacctaaaaaagcgattgtcagcagaatagggacaatgaccggattcgtcagccatcttgctgtcttttctgcaaagctctcctttgcatagctgatctgcgccttttcgaacccaagcttctttacgagcgtggacaaattgtcagcagtgccttctgaatagcctacctcaatcgccttgtctgcgttaagtgtcagcagatctcccttaggcgcgccaacttccttggcatctatatctgggtcagccattgcgagcgcatattttggatcgcggttatttttcactgcggcatcttccatctctgccagccaaagtgattgagctttttggtcagcggcattgccttggccatcaacaatcgcggaggctcccatttttccgccaggcgccatataaatgtgatctgcttgaagtgcaatatatgcaccagcagacaacgcgcgtttgttgacatatgcagttacggggatctcactttcggttatcaaatcggccatatcaatagcagatttgaccaatccccccggggtattgatatcaagaataatatggtctgcatgtgcatcctttgcgtcttgtaacgaacgggacaaaaacgaggcgagaccctgttcgacatttttttcaaccgggatcacataaacagtttgtttttctgcttttgcgttcagctgtacgcctaataaagaaagtaaaaatatacccaaaagagcagcacggaatcctttgatttgaagcaagggcggtgtatccctccttccttttataataagtgccttctcttcatacgtaacaaatgtatcaaaggtttcatttttttatgtataaaaaaagacatctctcttagaaagatgtccttttctttgccatttaagacagttgactgctcacaagcttattaattaaacttccgtcagctttaccttttactttaggcataattgcccccatcactttgcctatgtccgcttttgagctcgcaccgacctccgcgatggtttcatttacgattgtacgcagctcttcttctgacagctgctcaggtaaataaacttctaaaatgtccagctctttttgaactttatctactaaatctaaacgattagcgtttgaaaattcctggagggagtctttacgttgcttaagttcacgagaaaggacagtgagttcctcatcctcggtcaaactgtctttcttaagcttaattgcttcattttgaagtgaagccttaaccattcgaacgacagtcagtttgtctttctcacggtttttcatatacagcttcatatcctggttgagacgctcaagaagactcataaatccaccctcttttagaatttgcgttttctagcagcttcagactttttcttgcgctttacgctaggtttttcataaaattcacgctttcttgcttcttgcaaagtacctgtctttgatacactgcgtttgaagcgacgaagagcatcttcaagcgattcgttttttctaacgaccgtttttgacattctctttccctccctccgaatacaccaatcgactacctttaagttacacatataaacatgtactttgacattataatataagccatcagtcaggtcaactaagtgagttcacttttccgtcatgagtgcgactgcctgtctatataatgaaagaaaggggttggtgaataggatgttaattctgattagctttactgctcttatattattctttctcgcaggcatgaacatgcttcgaaaaggcttaatttctatggcgtactcaaaaattgaagaacgtttgcttttatttacggaccatccgttaaaagcgtttcttatcagcattgtatttacgggaatacttcagagcagttcagcttttatggtcattgtcatcggctttgtaagtgcgggcgttctttcttttaagcggacgataccaatgattctggggacgaatgttggctctacttttacaactgaatttattgctatcaaaatggatattttgatctgggttcttttaataggaggtttattgttttttctgactggcaggtatcctttgaaacagctgggaacaagcttccttggactgggcatcatcttcttttgcatcagcggattcagccatcttgccgggccgctgacaaagctgaaaacgggagccgacgttctataccatgttaacgattcaaactggtccgctttgctcatcgggatggtgttaactgccatcattcactccagttctgtctgtatcggcattttgatgagttttatgaatgaagggattatcggactgacacaggcgatgagcgtcgtactcggatcaaatatcgggacatgcattacagctgtcatggctgctgtatccgggggatatgcggcgaaacagacagcgtatgcgcatgtggtatttaacgtgctaggggtggctctagtattgccttttctgaccgcagcgaccggctttgtagagcagttatcacccgatcctgcccaaaggattgctcatttcagccttttatttaatgtggtgacagctcttttgtttcttccgcttacaaacttgttttaccgcttgattcactttcttatcccggctaaataaaaaaccggtacattttaatgcaccgattttttaggttaagaagacaaacgcatatgttcagttatttcatcctcaaccacacggacaaactgtccttcgttgtaaggataacctgcttttaggattttgacttttacgattttgccgatcatatcttccgtgcctttgaaaacaaccttcatataattgtctgtgtaaccgacaaacatgttctcttcttctgtttctttataggcttcctcaggaataatctcaagcacttcattttcatactgagaagcgtattcttttgcaagctggtcagaaagagcaatcaggcggtgcacacgttcgtttttcacgttttcatccacttggtcttccattcgcgcagctggtgttcctgtacgtttactgtaagggaaaacatgtagctcagagaatttatgttctttaataaagttataggtttccataaattcttcttctgtttctccagggaacccgacgatgacatcagaagtaacagctaagcctggcagtgcttttttcaatttatttaaacggtctgcaaagaattccattgtatacttgcgtctcatccgtttaagcactgtgtttgatccggattggataggaatatgcaaatgattcactatcttatctgagcggtctaagacctcgatcacttcgtcagtgatttggctggcttcgattgaagaaattctgatccgtttcacgccttccacacgggtgtctaattcgctcaaaagcttagcgaagttgtaatctttcatatcttcgccgtagccgcctgtatgaatacccgtaagaacaatttccttatatccggcatcaacaagctgctgcgcttgtttaatgacctcttcaggatcgcgggagcggagcaggcctctcgcccacggaatgatacagaatgtgcagaaattattgcagccctcctgtattttcaatgacgctcttgtgcggtccgtgaaagcaggcacatcaagctcttcatatactcttgctttcatgatgttgctgacgccattaatcggctggcgttcttctcggtattggtcaatgtagccaagcattttttcacggtcctgtgttccgactacaatgtcgacaccggggatcgccataatctcagcaggtgaggtttgcgcgtagcagcctgtgacacagatgacaccgtcaggattttgacgaatggcgcgtctgatcacttggcggctttttttatctcccgtatttgtaaccgtacatgtattaatgacatatacatcagctgtttgttcaaagtctcttctttcatagcccgcttctttgaaaagctgccagattgcttctgtttcataatggttgactttacagccaagcgtatggaaagcaacagttgccattactgatcacctcttaataactctgtttgataagaaatcgcgctcaacgcgtatagcggagcggtttctgtccttaaaattctcggtccaaggccgcacggcacaccgtcttgctctgtgagccgttcaacctccgcttctgttaaaccgccttcgggaccaaatacgatcaatagagatgatcccttcggaaggctgcttacaatcgcgctgaatgcgcttatttccccttgcttcgatgactcctcgtatgcaacgacacatttatcgaaatcctgcatcctttgaagaagctgctgaaaagaatggacatccatcactcgcggcacttcgttacggtacgattgctcagccgcttcctttgcaattttcgtccatctttcccgctttttctttgcctttttgtcatccagcttgacaacagaacgcgcggcttggaaaggaataaaggcatgagctccgagctcagtccccttttggataatccattcaagcttatctcctttcggaaggccgctcgcaatatagacctttatcggaagctctctgttttcattcgtccattctatcacaaggcaggacactttatctttggaaacagattgaagttcacattttgcctcgaagccgtcttgagagcagcagataatctgatctccctcattcattctcatcacgttcacaatatgatgaacatcttcgccggtaatcgaaaaagccggcgcttcctctatttgctgcttcgtgagctcgataaaatatcgttgcatacgctgtgacacctactaactgttattttttcgcaataatgctgacccaatcttccattgaaaggatttctacaatggtaaagccagcttgttccagtgcttcttttacttcttgttttttatgaccgatgattcctgacgtaataaagtggccgccttcttttaagaggctgtacgcttgtgaagtaaagcgaagaatgacttcagccaaaatgttggccacaatcacatcatgttccccttcaatcccgtctaacaaattgttttgcttcacttgagcaatatcgctgactttgttcagcttgagattaaggcgtgcactttctacagccacgggatcaagatcgtaggcatgaaccgattcagcctcaagcattgcagccgcaatacttaaaattcccgaaccagtgccgacatcaatcaccttatcacccttttgcacaaagcgttcaagcgcctgaatgcagagtacggttgtcggatgtgtccctgtgccgaaagccattcccgggtccatttcaataatcagttcatcagtatggaccggcgtatattcctcccacgtcggcacaattgtaaacttttcagaaattttcacaggatgataatactttttccaggcagtcgcccactcttcttcatttacttcagaaatagtgatgtggtttctgcccaaatcaatattgtaaagaaggagattattaatcgtttctttgatgccgtctacagtttcgcccagaaaactgttaaccggcagatatgctttgacaatgacaccctcatctgggtaatcattggggtcgagctggtagatttccccgtacacattctcacgttctttaattaaatcaagcgggtcctctatcacaaccccacttgcaccagcttcatgcaatatatttgagataggttcgaccgcttcatgtgttgtgtgaatgcttaattcggaccatttcaaaactaccaactcctcatccaataattaatcgcctttaaacgcccgttttaccttgtcaaagaaactcatttcctgttcgtcaggcaggtttccgctgacttcggcaaattcgcggataatgtctttttgtttatctgtcagatttgtcggcgtaacgacgcggacgacgatatgctggtcaccctgtccatagcctctgacattttgaacgcctttgcctcttaatctaaatttcgttcctgtttgtgtaccggccggaattttcaatttcacttttccatgcagcgtcggcacttctacctcatctccaagagcagcctgagcaaacgttaacggcatttcacagtaaatatcatcgccgtcacgctcgaagaactcgtgtgcgcgtacatggaacacgacaaataaatccccagcagggccgccgtttattcctggttcaccctgtcccgagagacgaagctgctgcccgtcatctacaccggctggaattgtcacattgattttcttgcgttttttgatttttcctttgccgccgcagtccgcacatttgtttttaatgattttgcctgtaccttcacagtggtggcagacccgtctgttaacgacttttccaaacggtgtattttgctccacgtttaactggccggagcctccgcagtgggagcatgtttctggatttgttccaggtttcgcacctgagcctttacatgtttcgcacgtttcctcgcggggaatttcgatggttgtttctttaccgaaagccgcatcctcaaacgacagggtcatcgtatactgtaaatcagcaccctggcgcggagcgtttggatctctccgtcttgtgcctccgccgaaaatacttgagaaaatatcatcgaaaccaaaaccgccgaaatcgccgccgccaaaacctccgccgccgaagccttggttagggtcagtgtgaccaaattgatcgtaatgcgcacgtttttggtcatctgacagcgtttcgtacgcttcttttacctctttaaatttttcatctgatccggcttctttgttaatatcaggatgatatttttttgacagcttccgataagcttttttaatttcatcctttgaagcgctcttacttactcccagcacttcatagtaatcacgcttactcatctcgcttcactctcccgaatttctcacataaattagattgtatcattttgaattatgatttttcaattccttttatcccgggcaagaaaaaaagtcaaagccaagagatgcctgactttgactttctaatcattgaatcagattatgaaatgtgttcttttcggtcagctccggaagcggggctgacactaaaaagaacttattttttgttttggtcgtcgtttacttcttcgtattcagcgtcgacaacgttgtcatccgctttgccttcagcgtttgctccgccttgagcttgctgtgctttagcagcttcttcataaagcttcatagaaagctcttgaacgattgtttgaagctcatcctttttcgctttgatctcttcaaattcgtttttctcaatcgctgcttttaaagcatctttggcatcgttggcttttttcacttgttcttcgtccactttgccttcaagatcttttaatgttttctcagtttggaaaacaagctgatctgcttcgttgcggacttcgatttcttcttttttcttcgcatcagcgtcagcattttcttccgcttcttttaccatgcgttcgatctcttcatcagagagacctgaagaagatttgattgtaatgttttgttcttttcctgtgcctaagtcttttgctcttacgtttacgataccgtttttgtcaatatcgaaagaaacttcgatttgaggcacgccgcgcggtgctggcgggatatcagtaagctggaagcggccgagtgttttgttgtcggcagacattgggcgctcaccttgaagaacatggatatcaacagctgtttggttatcagcagcagttgagaacacttgagatttgcttgtcgggatcgtcgtgttgcggtcgatcagttttgtaaacacaccgcccattgtttcgataccgagagaaagcggtgtaacgtcaagaagaacaacatcttttacgtcacctgtgataacgccgccctgaatcgcagcaccaagcgctacaacttcatccgggtttacgcctttatgcgcttcttttccagtttcttttttgattgcttcttgtacggcagggatacgagttgatccgccgacaaggatgactttgtcgatttcgcttgcagaaagtcctgcatcttgaagcgcttgacggacaggacccattgtgcgctctactaaatgagaagaaagctcttcgaatttagcgcgagttaatgtaagttcaaggtgaagcggtcctgcttctccagctgtgataaacggtaaagaaatttgcgtagaagatacgccggaaagatcttttttcgctttttcagctgcgtctttcaaacgctgaagcgccattttgtcttttgacaaatcaatgccgttttcttttttgaattcagacacaagatgatcgatgataacttggtcaaaatcgtccccacccagacggttgtcgccggcagttgaacgaacttcgaatacaccgtcgccaagctcaaggatggaaacgtcgaatgtaccgccgccaaggtcgtatactaggatcgtttgatcttcatctgttttatcaagtccgtatgcaagcgctgctgcagtcggctcgttgatgatacgttctacttcaagacctgcaattttaccagcgtcttttgttgcttgacgctcagcatcgttaaagtatgcaggaactgtgataactgcttttgatactgtttcgccaagatagctttcagcgtatgatttaaggtgttgaaggatgatagcagacacttcttgtggagtgtaatcctttccttcaatttcaactttataatcagtacccatatgacgtttgatagacataattgtgttagggtttgtaatagattggcgtttagccacttcccctacttgacgttcgccgtttttaaatgcaacaactgatggcgttgtgcggtttccttcagcgttagcaataactttaggctcgccgccttcaagcactgccacacatgagtttgttgttcctaagtcgattccgataactttactcacttgaataacctcctgctatgtaattattgattcactttgaccatggaagggcgaatgacgcgatccttcagcttatagcctttttgcatttcctcaacaacaatgttggagccgtagttttcgtcttcagcctgcataacagcttggtgcagattaggatcaaattcctgccctacagcttcgatggcttcgacgccttcttttttcaaggcttctacgagctgacggtggaccatttccattccctggagcaaacttttcgtctgttcattgtcggcttcaacctgaagcgctcgttcaaagctgtcaagagccggcagtaaatcagtcacgatattttgagaacggtatttttgggacgcttccatctctaaacggctgcgtcgtttatagttttcaaagtctgcttgaacacgcaaaagtttgttttctttttcctcaagcaaaccttgcaattcgttaatttggttttgaagaagttcgctttcatttgtttcttcctgctgttcatcagcggcagcttgttcttcaatgatttcttgctcttctgtttcgttttgttcaacggtttgtttttcttctgacattgtgttcacctccctcaaagtgtaaggagaaggacaggtgctgcccttcgataaaatttgccaaaattcccttattcatcatacagacttgttaatgcttttgacaagtccgaagtcacatgctgaagcaggctgacaaccctggaataattcatgcgggtcgggccgatgatcgcaattgagccgatctgcttctggtctacggaataagaagccgttatcagactgcaattttccatctcttcatagtcgttttcttttccgattttaatcgaaattcccgtgtgcggggattgaaccagctttaaaacatcctgttctttctcaattaatgaaaggagcgaccgaactctggtgatatcatggaactcaggctggttcagcatattgattttcccgccaaaaaacaacttttcaacgtgatttgtggaatgaaatgttgaacgaagcgcgtcgagtatattgtcatagtttttaatgtgctgtcttaggtacatgacaacttccttaaatatgcgctcattcagttcatccattggaacgccgcttaaacggtcgttcagtatatttaccagtttttcaatatcagacagatccattttggtcggaaagttaatcgttttgttttccacatgccccgtattggtaacgagaatcgctaccgccatatcaggctgaatcggaatgatttgaatctgtttaaggtaattctcactcaacttcggcccgagtacgatggatgtgtaattcgtcagatcggacaaaatttgcgctgatttttgaactgtcttctccagctcgaaaattttctctttgaagatcgagtggatttggtccaggtcgcttttcgtcaatttgacgggtgacagcaaatggtcaacatagtaccgataccctttttctgacggaacacgtcctgaggatgaatgggttttttcaataaagcccaattcctccaagtcagccatctcgtttcttattgttgcagagctaaatgtgatttcatcttttttcgaaagagttcttgatcccaccggctgtgccgatttaataaaatcgttgattataacctgaaggatcagcagctgacgatttgttaacatcatcatcacctctgttagcactctcaataagcgagtgctaattctataacaaaagtatcaaaccacaagaaaaatgtcaattataactcacccaaaaaagcgccaaaaacttcattgcctaataatttcccttgatgagtcaaataaacggcagactccgaattgtgaatcagccctttttcagcgaggtcttttaacacgcttgggaaaagtccatccagggaacggccgtatttttctgcgaatcgttttttgctgacaccggctgtttttctcaaacctaaaaacatttcttcctcaatctgttcttctgttgttacttcatgtgtatctctgtacggaaaacccttttcagctatcaggtcaatgtaatgcttaacaggtccgacgttcactgttcgtgtgccgccgatatatccgtgagcgccggctccgaaaccgaaatattgttcgttgctccaatacgttagattatgcttagattccatgcctgccttagcaaagttgctgatttcatattgatgaatgccgtgagcttccatctggctcatcaccatttcatacatttcagcttcctgctcctgcggcggaagatgaagccgccctttttgcatcaaattataaaataccgttttcggttctacaataagggagtaaacggaataatgctcggcatccagtgataaagcagtgtttatggaatgttccagatgcttgagggtttgccccggaagcccgaacatgagatcaagactgatattctcaaaaccgatttcccgcgctctttcaaaagaggtgaatacatctttttgcttgtgcactcggccgattttttctaacagatcgtcttcgaacgtttgcacaccaaagctgaggcgatttacgcctgcttcttttaatatttttaatttctctgcggacaagtcgtccggattcgcttcaaccgcaaattccgataagtcgcttgagggctttagcacgcggttgatcatatctatcagctttttaagctgttcctcagacagggaggtcggcgtgcctcctccgataaagattgttttaagatcaggctgcccggtttttgctattgtatttatcatttcctgttcgagtgcgtttaaatactcgtcgactggctgactttgaataaaatatttattgaaatcgcagtagtggcaaatatgctcacaaaatgggatatggatataagctgatttcaacggattcaccttctttacagaaagaagccgcagtacaagactgcggcggcttctattgttttttcggactgtcgtccattttcagaactgccataaatgcttcttgcggcacttcaactgagccgacctgcttcatacggcgttttccttctttttgtttttcaagaagtttccgtttacgcgagatgtcccctccgtaacatttagccaatacgtttttacgcattgcttttatggtggagcgggccacgattttctggccgattgcggcttgtaccggaacttcaaactgctggcgcggaatgagttctttcagtttttcaacgatcacttttccccgttcatatgcgtaatcacgatgcacgataaaggaaagggcatcgattttttcaccattcagcataatgtccattttcacaagcttggacggtttgtagccgatcagttcataatcaaaggacgcatagcctttagtgcttgatttcagctgatcaaaaaactcatatacgatttccgctaatggcatatcataaatgatgctgacacggtttgcgtctaaatactgcatatcaatgaaattgccgcgttttccttggcaaagctccattacagcgccgacatagtcattcggcaccatcatcgtcgcttttacgtatggctcctcaaccctttcgatcttttgaggatccggcatgttggacgggttgtcgacaacgaccttttcgccgtctgtcatatacacgtcatagataacgcttggcgctgtcgtaatcaggtcgatgttgaactcacgctcaattctctcctgaatgatctccatgtgaagcatgcctaaaaatccgcagcggaacccgaatccaagcgcttgcgaagtttccgcttcatattgaagggaggaatcattcagctcaagcttttcaagagcttcccttaaatcattatacttcgctgtatcaatcggatacaaaccacagtacaccatcgggtttagcttgcggtatcccggcagcgcttcttctgcaggattggcagcgctcgttattgtatcaccgacacgtgtgtcaccaacatttttgattgaggcagtcaggaagcctacatcaccgaccgtcagttcatttgtcggagttgctttcggcgtgaacacgcccacctctgttacttcgaattctttgccggttgccatcattttgattttttgtcccggctttaccgttccttcaacgactctgatataagccacgacaccgcggtaggcgtcataaagcgagtcgaagatcagcgctttgagcggcgcctccggatctccggtcggagctggcaccttttctacgatttgttctaaaatctcctcaataccgataccggcttttgctgaagcaagcacggcttctgatgcgtcaaggccgataacgtcttctacctcttggcgcacacgttcgggctcggcgctcggaaggtcgattttattgatgaccggaaggatttcaagatcgttgtcaagcgctaagtagacattggcgagcgtctgcgcttcaatcccctgggctgcatccacgacaagaatcgctccctcgcaggcagcaaggcttcgggatacttcatacgtgaagtcgacgtgtcccggcgtatcgattagatgaaagatatattcttctccgtcttttgctttatatttaagctgaacagagtttaatttaatggttatgccccgctcacgttcaagatccatagaatcgagcaattgttctttcatttctcgttgagtgattgccgacgttttttctaaaatacgatccgctaaggtcgattttccgtggtcaatatgggcaatgatagagaaattccgtattctcgattgcctctctaaacgcttttctttatctgtcacaatctatcactcctactattaaacgcaaaatacactagcttagattatatcaataggattgtaaagattcaatgtaaaacaagaaagagaaaagttccctatcatatctgggttgcttttctctttcacgtacttattgattcatatcccgtatccattcatacattgactgggcagtattggttacggtgtccgaaagcgcttttccggcttttgaaaacatattgaatgtctccaccttttccagctctttttgtttttcttctaaatcttttgccgtgactgtttctcctaggattgaggcttctttttcattatcttttccgtcggtgagcgtaaacgcccccttcagtgaagggtcatgatagcctttcatactcagcatcccgtggtttgcctgctgcatgccgaacagaacgcctaaaaacatgatcgtgacaagcagtaagcactttccaaagtatgcaatcaaatcaaccacctatttcttattgttttttcgtctccccgctcgctgcgttgaccttttcagcatcccagtacatttcgctgaatacgtccgcggccgcgttagccgcacgctgcagctcttcgagattattatccactccgccaaactcgagcaaaagcgctctatcggttaaatcctgattgtaaacaccattatcgcctggcgagcctttggaaaagacacctgtgctaagtccggggtattttttctccatcagtttatgaagctcactcgcaattttatagttttcttcgaagtttttgctttttttcccgacgacaaaggctaccctggcatagcttttccctttaatcgttgcggttgtgtcttttttgcgccgagagtctctgtggatgtcaatgatatattgcagatttttgtttgaagcgagggcgtctttcacgaccggccttgattcatcataggacctggcatagtttaagccttttttattcaattttgactgtatatcggttttattcactgtggctccgattccctgggattcaagcgcttgtccgaacatatctcctacaagcgtgacattggctttagaatggcgcgccatgtcaggatcggtctcgccttttaatagagggagatatgattccgtattgtgcgtgtgatagataaacacgacctttttatcacctgttgtttgtttcggcggatctttttgcgcattatctgattgcgtttgctgtttttcaatctctgccaaattcgcttctctttcttcctccatcaccttagacggcggcggcgattccgcaggcatattcgtataatccgttccttgtccagctaacaaaatctcggtatcaaattgtgcaaatcctggcagctcccgaccgagaaagctccgcggatcttcgaggttaatgctcgtcgccagctttaaagaaagacgagaaagatgaaatgagctgtctgtttgagagaggtcagaagcgaaataatggttttccatctgcagcaaatgtgcaaatacgtcacccggcaattcttcagcaatcccataaaaagagtcagacgacggcctaagttccggccggagagacgtcagcacaccggatagaacaaaaatcacgataaggcttacgataaatagaaagatggcttttaccgctttccctccatttaccgcaacaacaatctgtctgtttctgcgtttatttctcattgaatccctccagcgcttgtctagtaattactctatgaacaagctagaggaagtagaactgtttagtgattgtaggagcctttgttttcttgtgacactttttcatgaagcgctgtgtttaatccgttcgctaaaacatttgccatatcgtcgataaatgaatcgacttccttcggtgtaaccattaagttgtgccctaaaggcgaaagcacctcgtgaatgagctgccgtttttcatcttcttgaagggttccgacaatacctaggaacgattggcgctgcttttgatcgggaagatcgtcttcagtgagcactttctttttcccaaacgtcatgcctgccggaacaagcgatcttgatggcctgttatccttcatttctctgccaaaatgttttaatatgtagtccaccgtgtcgctggcaattgtcacggcatcaactactgtcggaacaccgatagcaatcaccggaacaccaagcgtgtctttgcttaaatcttttcgtttattccccactccagaccccgggtgaatgcctgtatccgatatttgaatggttgtgttgaccctttccaccgcccgcgccgccaacgcatcaatggcgatgacaaaatcaggcttcgattgctcaatcacacctttaataatgtcacttgtttcgattcctgttatccccattacacccggtgcaaaagcactgacaggcctgtaaccctcctgtacgttttccggctgaagcttaaacaagtgccttgttaccaacagattttctactgccatcggtccaagcgcatcaggtgtcacgttccagttgccgagcccaacgatcaaacagctcgcatcttttgagatattaaggttttcaagaaaagctgagaattcctccgcaaagacagcagagaccttctcttgcatttccgaatcattctccctgattccctgtgcttcaagcgttaaatagcgcccttctttttttcccgaaagctctgcgccttcctttgtaacatcaactgtgcggattttaatgccgccgtgatcacgctctttttcaataaagcctttaatttcttttgtcggcacagcctgctgattggccattgcttccttcgtttccactgccaaatcggtccgtatcaaatactgattcacatccagctcactctttttcatacaggggcctccttcacattaagtacctatattgttgccatttgctgaataaatcatgctaaaaagagaaccttcaatgaaaaatactttacatttatattgcaatctaaaggtgtgtttgatagaatacaatttgttctattgtgaagaagatttaaccttaagacactgtgctacaggttgtatcttaggaggtgaaacacatgccaaacattaaatcagcgattaaacgtacaaaaacaaacaacgaacgccgcgttcataacgcgacaatcaaatctgctatgcgtactgcaatcaaacaagttgaagcttctgttgccaacaacgaagttgacaaagcgaaaactgctcttactgaagcagctaaacgtattgataaagcagtgaaaacaggtcttgtacacaaaaataccgcagctcgatacaaatcaagactagcgaaaaaagtgaacggactttctgcataatataaaaacgatcctcaataatggggatcgtttttttcatttctttttaacagctgtaaaaggaacagttcgagcaggagctgcttgtcctttttcccggttttcatctcatagtccatgacggcaagctgttcaataattaaacggagctcctcctctgaaaaaagccttgcttgatccatcgccagctttacccgaaatgggtgaacttttagattagaagcgatttgtttttgtccgtatccctgttccgcgaagtacttcgtctgcagaatcagccggaactgattcgaaataagcgccataattttgatcggttcttcattttgttttagcaaatcataaaaaatttgcagactctctgttcgttttcggttgacgattttattgatcagctcaaaaatattttgttcaaggcttctagcaacaagcatttttacatcatccagcgtaatttcttcacgatctccaataaacgtgcagagcttttgaatctcctgaaaaatcgatgacagatgaccgttcacaagcagaaccaaatgctccgccgcttccgtgccgattgttttctgctctgtttttgcaaggttgacagtaaagtctgtcgtttcctttgcatttaattccttcgcctccatcataaacgcgtgcttctttaacgctttcgtcagcttttttcgctcatcaagcttttcatacggagcaagcaggacaaagactgtgtaaggcgcaggtgattgtatatatgattcaagcgcactgacgttgtgctcaattttttcttttttcttttcacctgttaaaaaatatggatttttcacaatgacaagacgccgctcccccataaacggaaacgtttcagcatctgcaatcgcttgatccagcgggtcctcttccagatcaaaaacggatagattgaaatcctttgtctcctgatcaacgaccgtctgtctgatcctgctgacggtttcttgcagcagatatgtctcttttccgtataaacaataaactggatggacatctccttttttcaggcttttccacacatcaaataccattgttgtacgacttcctctctttcatcatccccttctatcctaaattgagtttgcaaaatagtaaagaggaagcctgactgctgcttccccatttatattaaacgcctgttcgcaagcccccgggacagcttgtaaaaaggcgataatcaccagaacagaaaacgttaccttagcttctagatttttcaaaacaattccattatacttaagtcagtcaggagggataaagttgaatgattttgaaaaaaacgttcaaagcaaacgaaatgatgctgtagattcagctgttggttttgttgtgtccttcggatttttcgccttcttgtttgtcatggcaacggttattcacctagttggttcataacagcgactgcccgggctgctgatttctcggcagtcttttttagttcgtctctgttatatctgatgtatcatatggaggatagacagaaaaggttccaactctgtttttgtatctatattggatcgttccgttttgatctgttcgcagcacgcggatagaatgtctctgtaatagttgcagaacttcttgatgaggatgatggtaccgattgtttttcccggctgagataatggccgttttcggctgaagctgttggatgaattcttcaccggtagagcctttgctcccatggtgccccacctttaagacatctgctttaatatttggaaacacgtccatcacctcctgttccccttctttctccaggtcacccgtcaagatccagctcataccgcccgtctccatccacagaacgagagaggaattatttttgcttgccggatcaggtgctccaggtgacagtacatggaactgcaaatcctttatttgcaatacatctcctcgcttcacctcttcaattgtcactccctcttctctggctgtctgcagcactttctcatctttaggttcagaaacgaaccctttcggaatcacgaggcgctttactttatgatgcttcagcagagtctccgcctctccgatatgatcttggtcagcgtgcgtcagaattaaagcgtcaagctgtttgattcccttagcagttaaaaacggaatcagcaccttttcccccagtgaaaacggatgctgtttttcgcgccaaggctctgacgagtaagacaaagtgccgccggtatcaattaagacacgcccccgctgatgcggagcacctacaaacatgctgtcaccctgtccaatatctatcatatccacttctccttcggaactaagacacggatatataaagagcagaaacagcaccgtgcagcaaatgcctccggttaccatcaactgcgacaaggagcgtttttcaatcgccataagcaataggatgatcgtgaccgtgaataaaaaaagcaaaacaggtgcaggatgtgcgatcataatcgtgaacacatcaacatctgcaatgtttgtgattagcctattggtccagcttatcaataaatcaaaccagctgaaaaacaatctcccaaacgaagcggaaagacttaatagaagaacacctgctacagctcccggcaaaatacagaaggtataaaatggtaccatcaacatattcatcggtacgctgatgatagaaaactgatgaaaatgatatagaagaatcggaagcgagcccagctgagcgatgagtgatacaattgtcagctgtcccaaggaggttttaacctgctgaaaaatagaagaggatagaattaaagaaaaactgacggcgaacgatagctgaaaaccggcttcaaagagatgataaggattgaagagcagaaggacgatgtatgaaaggcaaattgcagttgcagagtggacacgccatttgacaaggcttccagctaagtaaacacccgacatgagagcggcgcgtagcactgaaggagcagcgccggtcaacatcacatagagcggcagaaataacagcaacagaattgacgccttttctctagttataccaaggcgaatcatgatataaaacaaacctgctgtcaaaatccccacgtggagtcctgatattgccaagagatggacaacaccaagcttttgatacgcggtaagcacttcatcctccacataaaatctgtcaccaactgtaagtgcctgtacaatccctgctgaatcaggaggcaaaaggctgtttgtgaatgatatgatatgttttctcaagctgagcaccttgtacttaaaattttcaggttcgctgcagttttggatagacgtgacagagtagttccaatgaatatgctgccgataaagatactcgttataatcaaatgcacccggcacagttgcgtgattcggttcttccaatgtaccagtcaactcacatgacattcctggttctatgtataacagctgttctttttcaccagcagactgaatgcgatacgcagcagcccatttttccttatcaggtgtctcaaccatcatagacatacggtcgccgtcaattttgggaatagtgtcaatcactgccttgaattgataggttccctgccgataggaagagacattctgagaatctgtgactgcatacagtacaaaaaacaatataaaagagaagaaacaaacaataatgagaaaagcgtgcctcgttttgattaaaatgatgaggagaaagaggatgaaaagaaaaatagcggggaaataagcggcggcagtaattccaaccgttgccgaagctgccgccataggcaataacaaacgcgaattacgcattcatcacacgtagctcgtgaaaagtgtattcgcctgttcatgtatctttttcaattcttcctccgctaaaccggcatcggccaatttccctattagacccgctacaaatgaaagcttttccctgtttttcagatcaacgatcatttcatcgagttcaacctgttcaactgttacacccgcctgttcaaataattcctgcgcatacggatgtgttttgtaatcctcagcataataaaccgttttgataccagcttgaataatagatttgcagcattgaatgcacggataatgcgtcacataaatctcggctccatcagtcggcaccccaaacttagagcattgaagaatcgcattcatttcagcgtgaatcgttcttgcgcaatgatcatctatcattaagcatccttcatctgcacaatgtacaccgcccgcgattgacccgttgtagcctcctgctatcatgcgtttgtctctgactatagtagcgccgacagataatctcggacatgtgctgcgcagcgccaataaatggctttgagccataaaatattgattccatgaaattcgttccacgttgttccctccaaatgttgtgttgcctgacctttagtttacctatcataatgcatgaccgtcaaatcactttactgtaatggaagactttattttctcaaatgacttttcacctattcctgaaaccttagtgatatcttcaattgtttggaaacgcccgttttcttcccggtatgcaataatagcttcagctttggatggccccacccctgagatgccttgtaactcctctaaggttgctgtattgatattcaccagcggccccttccctccatcgctttggacagaccctccggtaccttgctgcactgctgtttcctctccctttttcgggatgtacaccactgtcccgtcctgaagaacctcggccaaatttacttgcgcttcgtctgcttgtttactggtcccgcctgctttctcaattgcctgagatactctgtcccctgttcgcatttcataaacgccaggatgctgaacagcacctttgatgtctatcacaattgtttcgcttgactcgtcgttgtttgcttcctgctttaccactgtattttctgtctctgttggtacagcttgcttcaccggctctttatttttccctgtggccagaaagatcataatagctgtgaaaacagccgcagaagccgctaaaataattgttttcttatgctgattcaaccaattcatcgtgcatgttccccgctttcgtcatattttattttcataacacatatggtttagaggataatagctcaaaggaggggaaaccattgaagataggctttatcggcacaggaaatatgggtacgatccttatcgaatcatttattgaatcaaaagcggccgatccctcaaacataacaatcacaaaccgcacaattgaaaaagcgttgcacataaaaaaccgctacaacagcatcaacgttaccgaaagtctcgaaaagctcgtttctgagaacgagatgatttttatttgtgttaagccgcttgatatatatcctttactggcaagagcgttaccttatttaagaaaagatcatattctcatttcaattacaagccccgttcaaaccgaacagctcgaacaatatgtgccgtgtcaagtggcgcgagtgatcccaagtattacgaacagagcgctggcaggtgtttctctcgtcactttcggcacaagctgcgacgaatctgcaaaaacgaaaatcaatgagctaatgcagcatatctctcatccgctgcaaattgaaagtgacatcacaagggttgcatcagacatcgtaagctgcggccccgcttttatgagctatctgattcagcggtttatagatgcagctgtcacggaaacatcagtatctaaacaggacgcgattttgatgtgtaaggaaatgcttgtcggaatgggaaaactgttagaaaccgaattgtataccttgcctgcattacaggaaaaggtttgcgttaaaggcggtgtaacaggagaaggcattaaagcgctggaaagcggtgtgcagaatatgtttcaccgggtatttcaaaatactcatatgaagtacgaggaggatatttccgcagtgaaaaagcagtttcatgtgtagacgagtatgtcatactttcgtctgtactgcaaaagcataaaaaagcattttaaaaaaccatcgttttaagaaacgatggtttttgatttctgcgccttgaaaaagaggcgttctgattgtgctgatggctcggtatccgtaaaatcagctgtcacgcgatggagctgaaagccgcagttcttaagcatttcttcgtattcttccaccgggaacgttctttgctcgtgtgtctcatcaaaacgatcatacgcttctccgttccacacaaaaaacgacatatcatgaatgacagaaagctcgtcacttccggcaaagctctgccaaatatagctgatatcttcgtcctggtcagcaaatgtgctatccggaaagacttccgcaattttataagatgaatgaacatcaaacagcaaaatgccttcaggctttaatacccgaaatacacttttaaaggtttcgatcacatcattttttgtttttaaataatttaatgagtcacagcatatcacaacagcgtcaaattgaccgtcaaagccggtaatctctctcatatcctgctgaagaaataaaataggctggctactcgataccttttgctgggcgaaagaaagcatctcttcgctgagatcgatgcctgtaacctcgaagcctttttcggcaagccggatggagatttcccccgtgccgcatgccagatcgagaatacggcctttttccgggagagatgcttcaatccattttgtccattgatcgtaaggcgcgtgtgacattaactcgtcatacacgcttgcaaagccctgataaatcattgattcattccaaagtcaagatctgcgagcggagcgtctccccacagcttttcaaggttgtagtagcttctttcatccttgtggaagacatggacaattacatcgcctagatcaacgagaacccatcttgcttcatcaaagccttccatctttttgacttgaatgccgttttcatcagcttgatccttgatttcacgggcaatagcctgtacctgtttatctgaatttccgtggcagatcagaaaataatcagcaaccagagaaataccttccatatccagtgctaaaatatcctctgcccgtttatcatcgcaagccgcagctgcgatctttaaaatggacttttggttcattcacaaattcctcctgttcagctgccagacacaagccagttatacgttaaaaatgtgtctggaaaaaccggttgattttttttcataagaaaaaccattgtatttttaatggactgaatcagcgcttgattcaaatctgtctcagcaagcttacgcacctcatcgacaccgggaaatgcccggtttggctcaatgtaatcggcaacgtaaatgactttttctaaaagtgtcatgccggggcgccctgaggtatgatacctaatggcgtcaagaatgtcttcatcttgaacccctgcctctctttggaccaaataagcgccgaccggagcgtgccagagctccggattatgatccaataaatgcgcaggcattttttcacgcgcaataatttgtttcatttcttctttcgggcggaatttggcgtaatcatgaaagattgccgctgtttccgcttttttagaatcggctccaaaacgctccgcaagttcgatcgccgtgttcatcacgccaaccgtatggatatatcggtgttcggtcaattgctgcttcacgcatgcaagtgcctcctcacgattcatataaaccattctcctctacatacttcttcactttatcagggattaagtagtcagtgggcttcttgcttttaaaccgttcccttatcatagttgatgatacctcaaattccggaacgtctgcaaagagaagcggataaggggtttcaacatgaaaaccggggcgctttactccaataaattgaatgaggttcagcagctcgtccagcttataccatttcggcaaatattcaatcatatcagcgccgataataaagaacagctgatcatttggataacgctgcttcagtaaagaaacggtatcaaaggtatatgatggcccttctctttccatttcaacaagctccagcttaaaggacggattagattgaattgcaagctttagcatttccacgcgatgaaagctgtcggtatagtcttcgttctgtttatgcggcggaatttgattaggcataaaccaaatttcatcaagccccgcctggtacagcacctcattcgccattaagaggtgaccattatgcggagggtcaaacgtgcctccgaaaattccgattttcttcatttcaaccacctttaaggaagctcgatttgtttattttcctttgattccttatataacacaatcgtattgccgattgtctgcaccaattgagagcggcttccttttacaagagcttccgctacatcgtttttatcctcttcgcaattctgaagcacgctgactttaatcagctctctcgcttcaagcgcctcagtaatttgtttaatcatgttgtcgtttactccgcctttacctacttgaaaaatcggcgttaaatgatgcgcttttgaacgcaaaaaacgtttttgtttacctgttaacattctgttcctcctaattttcctattacaatagatctcattttttcaatatcaggctcttgtccagtccacaattggaaagacaatgctgcctgttcaacaaacatgcccacaccatcgagtgttttcaagcctttttggcttgcttcttttaaaagggccgtctgtattggattatacacgatatcacatacgacggcactgctcgcggcacgctgtaatgaaagcggcacatcgtccacgttcggatacatgcccacagacgttgtatggatgataacatcatactgctcaagacgttcttctgcttcttttatgcttaatacttctttattgtgaaacgagggagtagcttctgtaagccgctttgctttttctaacgtccggttgcaaatgtcaaattttttcggggtatttcggacaattgttgtaaaaatggctctcgccgctccgccagcgccgatcattaagaatgacagttcagagatgggcttgtctaataccttcattaatgacttcacgaagccttccccatcggtattgtatccgacaagcttatctccctctcttctgaccgtgtttacggcaccgagcacttttgcactctcatcaatatgatccagataatccataatggaaaccttgtgcggaacagtcacattgattccttgtacgcctagagctcttattccttttaccgcatcctccagatcattctcttctaccttgaaggcatgataatgtccgtcaagcccgaggtctttcaatgatgcgttatgaatatcaggtgacatagaatggccaatcggatttccgataaccccgtacagctttttcatactcctctccccttttcttaaattaatgaacgccgaacaaatacatgaacgccttttggcgcgtatgcagttacctttttatcggcgtcatggacagtaacccagcctaacccagagaaaacgatatctgtctttttgtcttttatcgtaaacgtatgggcgaccaattccggaaactcatccatttcatctttacccggaggtgtgagcaattcccctgcatgcttttcataaagcgcgtctgcattttcaagttttgttctatgaatcatcagttcattcggcatatagcaaataaaaggagatctttccccagacacataatcaaaccttgcaagtccgccaaaatacagtgtttgctgatcattaagctggaatgtgcgaggcttcagctcctttttaggagataatattttcagatcctttttattgacataatgcgccatttgatggttgttgataattcccggtgtatcataaagcgatgaaccgtcatccagcgggatttcaatcgcatcaagggttgtgccaggaaattgggatgttgtaataatatcttcttcacctgacacttctttaataatccggttaataaaggttgactttcctacatttgtacatccgacaacatagacgtcttttccgttgcggtaatgctcaatcgcgtcaattacttctctgattccctggccgcgtcccgcactgaccaaaaatacgtcaaccggttttaagccaagctctttcgcttcacgcttcatccattggatcagacgctctcttttcagtgacttaggcaaaatatccgctttattgccaactaataagatagggtttccccccaccaagcgctgcagcccattaatccagctgccgttaaaatcaaaaatatcaacaatttttacgacaagagagtccgtttctccaataccgtgaagaatgttcaaaaaatcatcatcagttaaggagacatcttgtatttcattatagtttttcagtctgaagcaacgctggcaaatcacattttctttcgtaagcgatgcaggcggcgcgtaccccaaacctgttttgtcctcggtttggatcgtaactccgcacccgatacaaacaaccttttccatttcttactcctcccactgaatgtgcccttttcgtttgagagcactcagtattctgcgttcgacctggcggttaaagcgcgtaatgaatccgtcagaggaagcgactggcacgaccaaaatcgtatggtagccgtttcggtttcccccgagtacatcggtcagcagctggtctccgatgacaacgcagtcctcttttttcagctccatattgcgcaccgctctattaaaggctttacccatcggttttcttgctttatagatgaatgggattccaagcggttctgagaaaagtttcactcttctttcgttattattagagacaattgtcactttaatgccgtgttccttcatttcttcaaaccactcgatcaatcgcggcgtcgcgttcggcctgtcccattcaacaagcgtattatccaggtcagtaataatcccttttacatttcgttcctttaatttctcaggtgtaatatgaaaaatattttttacaaactcgtcaggtaaaaaaaacttttttaacaaaacccgcacccttccctttttctttctttcaaaatgattgtcgaaaaaaatcgaacttgcgcctaaagaaaaactgagcaaaaaaatttcgacaaaaattgggtttcttcaccaggtgtggataaatttacacacactatccactcttattacatcactctttagacaaattataaacacgatactcacaagttatccactttttggtgtggataacagaacgattgttcttatatgcatttcatggtagattaaagataacttcaacctcagatgaacgcaacttatcattgtatgcgttaaaatcatgaatgattccaacttttaaggaggtgcctctcccattaattgggttcctagcatgagaaaactgtctgatgaattactaatagaatcttatttcaaagccaccgaaatgaatttaaaccgtgactttatcgagttaattgaaaacgaaataaaaagaagatcgctcggacatattatttccgtatcttcttaataggaatttgtctattttttccgggcgtatttcctttttttactcagatgactgatattatatcactttggctgcgcgctttactactattttcagcaaaaaacacccctaaaaagaggtgttttaaagggccggttattatgctaaccagtatatgccgcccacaacaaggagaacaacaactaaaacaacaataaaagcgtatccatatgctctgcctgcgccatacatgtgaagcgcctccttaataaggttttataacagcctatgtaggagaaataaatcggactaggcggttgtccggctcaacgctgcaggatctgcccatcttgtattccttcatatacgatccttgcccctttaggtgtcatatgatttccagaaggatctataagaccagattggataagcgcttcatcagttgcttttccgccgtctgcttctataaaatgcttccagttatctacaagagggacatccaggcgcttcgacacatctcttgtaatatcgttatatgagttgtgccatttccttgctccgccttttggttcaaaagcagctgcttgatatctggaatagtaaaacaaatgatgcttcccattaccttctataattgggatacacgtcattaagattggcttgatcccgtgttttctgctttcttcaataaaataaaccagattttctctaaaacgctgcttcgacactctcggtttcccctcagtcagtatggcagcgtcattggtgccgaacataataaacaaatacttcggtttttgatccagcacatctgtctgaaatcggagacgggcatcctctgtcgtctgtccgccgattcccgcattgagtatatcaaggttaccgcgctcagctgtttttaatatattgacccactgctgtgcttttggataatcgcgataatcccaattagagccacgcgtattgctgtcaccaaatgctacaacgtcttcgtatccccttccctcgcatcctgctgtaacgaacagcagaaggaaaaggatgataaaatgtttcatctttacacccccaaaagcctcaccttaatgttatacctctgtttctcttcgttcaatgaagagtttttcgctatcactgttttttcctatagttaacgtgtccccctcagtgaatatcattctgctttcattgcggcgcagctgatgattttttaaaattcccttctttccaatctgaaaaacacacaaaccaaagaaaagaaaataacctaaatccgcactggaaacaggttatccgttaaatcctgcatttactttaacttcgatttaagcttggcctttgtttttggcccataaatcccgtctgcagttaatccgttcatgagctgaaaacgcttgacggcattcgctgttttcggtccgtaaactccatctatgccattgtttttggctcccttatcagggtaaaagtgaagtgcagttaaagccttttgcagctggagaatgtttgtgccctttcgataaggcgaagtgagctttataaccccagacggcagaggatatgatggtaaaggttcttttggaggtgtatccgaggaagaaattccgtttataaaagagttccagtggttcaagagtttccgcggacattctttcccagaccattttttgtggggaacaacacgatgtaacggaatattgttttccttcatcagctttctgatcagccactgggcatttgatgttgctttttcaaaatcgccatcagcattttcgcagatttcaatcccgatcgatttgcggtttcctgtcccgtttgtaccgtctcccgcatgccagccgttttcatctatcgggagatgctgataaatgactgaatcgtcaactgtaaaatgccagctttcggatgtgctcgggttttttacaaaattggcgtgcattttcgcatcagcgccttttgctgtattcgctgtattatgcaccgtaatataagcaggcgtcatcgcatagccaggacgattatcatttgataccggtataaaatccttttttatggttaccatttctatccctccctattattaagaatgcagaaaacagagagatggacagccttttttatgaggtaaaaaagaattgtgttctcaacctggttttcagttgaaccgctgaaatggcaccagttatactaatttagatgacggaggttttggctcctgacatcacctaagttgggagtgaccatagacatgttaaaaaaagtaataggtatacttgtgattatcgctatcattgcagtcggtttttttcagaaagaagcttggcttgatgcaatcaaagcaggagggatgttttccgttttatttagtatgctgctgattgctgccgatgtttttttcccaatagtgccgtttgctttggttgctgctttaaatggcgcagtgttcgggactgcaaatggaatttggattacactgaccggctcaatgcttggtacaatattgctgttttttctcgccaggtacagttttagagattgggccagaaaaaaagttcaggcctatcctgccatacaaagctacgaggcttccttcaacaaaaacgcttttaccgctgttttattaggaaggctgatacctgtcataccttcacttgtaatgaacgtgatctgcgggctgagccaggttcgctggcatgtttttttctttgcgtctttaatagggaaaatccccaatattgttgttgtcactattgcaggtgccaatttcaccagcaataaattattgtctatcagcatttacggtgcatatattctgatcatcatgctggtcatttataaaaagttccctcatcttctgaaggtgccaaaaaaataaggaggcttgttggcccccttactttttttctgtcgcatggcctccaaattcatttcgaagcgcagcgaccacctttcctgtaaacgtatcgtctgttaaagaacggtatctcatcatcagtgacatggcgatgaccggagttgccgtctgcagatcaagcgcggtttccaccgtccattttccttcacctgaggaatgcataatgcccttgatctgatccagtttcgcatccttagcgaaagctcgctcagtcagtcccataagccaagaacgaatgacagaaccatgattccacactctggcaaccttctcgtagtcaaaatcaaattggctgttttcaagcacttcgaatccttcaccaatcgcggccatcattccatactcaattccattatggatcatttttaaaaaatgtccgcttcccgcttcaccagcgtatagataaccattttcgacggcagtatcacgaaaaagcggttccacaatctcccatgcttcatgatcgcccccaccataaaacaggctccatgccgtgcgccttccattccgcccgacgttccggcatcgagataatggatacccgcttctttcatttgattgtagcggcgaattgattctttataatgagagtttccagcttcgataatcatatcgcctttacttaataaaggtgatacatcacgcaaaacagcatcgacaatgccatgcggtaccataacccataggatacgcggcgggtctaataaagaaattaactctttaagattcgttgtcccctcagccccgtatgctttcagttcatcaacagccgcttgatttacatcatatccaaccgcttgatgattgcggtcaatgaattgctttcctatgtttatgcccattttccctaagccgattaatccaattttcatatctgttcctcctgattgtctaaaaagcctttactctttatgttccctttggattgtattgtgatacgcagaaaacaaatggggcttacatcgtctgcgcatgtaaattttatttttcatgactgactgtgcctgccagttctattactgaatctctttatatccataattatcactttatccttgatttaccatcagtttaagttaaaatatgggaaggtattcgatttttttagtaaaaagaaggtgacatgttgcagaatcaatctcatactcttatcggagttacgaaaaccgctgtattctttttatacgctgcacttgcaatcatcggttttgcaatcgggtattttattccgcagattgcgaaatgggcattatccctcccctggatccctcttgaaggaccacttcggctcattacctcttttcagggatctacagcttcatttatcactgctcttctcggtatgtgtgcggggatttggttcgctcattctgttattgcaatgctgctgtctgtcaaaattacagatcacacagtggaattcatcaaaggaaaaaaagtgcaaacaattcattccgatgacatcgctcttgtatttatggatcacaaacggcttgtcctcctgggaacagccggatatgaattggtacgggaagaaattgatgaaaaaccagtaaacgttgagaaggcctttagacagcatcattacgaatgggcaacagatggtgatccgtttaaagatcaatttcgccgatggattcctgatgcaccagacctatcgcaaggcgcccatgccttattaaaagctcgtcacaaagcactgcaggacgaagaaaaagacgatattgaagaattccgtctcgaactggcacagctgggcatcgttgtacgggacgaaggcacacgccaatattggcgaaaagcagaaacctatcccccgaaaattcagctcggcgaaggattgtaacaacagaggctcaagaaagagcctcttctttattactgcacaataaacagcactctggtgccgtcagggtagctgctcatttgattccctacccacgagccggcgccgcgattatcagaaggcgtcacatatcggacatcagcccctgcaccgccttcctcgcagaccgccatcggccactcatcccggtcatagcccggcttggtcgggattccctttaaagattcctcccgccttttgtctgctccatctctgtcaatggtacaaatatctggatgtccctctgcaatcgcatccctaatatgactgccggtttccggataacgagacagcggaaaatataacactttgtcatacgaagatgcgccttggatctgttgcggaaccattaaacaaagaagaactgctgcagcaagaaacaggcctgccatccattttttcattcccatccccccatacctttgttcatttcaatgtatgggcgcttgatgaagaatatttttaacatttgaagttagtatgctgcttaccaaagccggactcccccgcgagaaatttcccggtacagacacagacagcctcccggtcacatacatttacatataggcttttgcctacatacttttgtggaggtgacgatggtgacaggtgttttcgcagcgctcggctttgttgttaaagagcttgtctttttagtatcttacgtgaaaaacaatgcctttccacaaccgctctcaagcagcgaagaaaaaaaatacttagagctcatggctaaaggggatgaacatgccagaaacatgctgattgagcataatcttcgcttggtcgcccatattgtgaaaaaatttgaaaatacaggtgaggatgcagaggacttaatctccatcggaacgatcgggctgataaaaggaattgaaagctattccgctggtaaagggacaaagctggcgacgtatgctgcgaggtgtattgaaaatgagattgtaattacaaaagggggtgcatactcctctttaatacgtttaaatatattcggtgatctcttctcctctcttggtttattattgaaacggaaacaaaaatccattacactattgctgatgcaccaacgggtgggaggactcgccatgaacaaaaaagaactgctcctaatgaatttcaaggacttgtttaacaagatggcttggcttaataagccaaagatggaagtctgtcttaaagggtataagccttctgaagtacattgtatagaatccattgaacatggaaatactaatgtgacaaaactagctgagtccctttatatgacgagggggccataagtaaaatgactaaaaagcttatagaaaaaggcttaattgaaagctaccagaagccagataacaagaaagaaattcattttaggcttaccgagcaagggaaaaaaatttataaaatccatgatgaactgcacaaagagtttctagagcgcgacaaggcagtatttgaacaagtaaccgaggaacaatttgactttatgattaactttgcggaaaagtataatagacatttggatgtagaaataaaaaaacaaggttttgatattaagtcggaataaatttaaataatgaaaatgcaaccacaggcagccaactctattgagtttcggctgcctttttattaccgtcattttgttgacgaggaaacaaaattatgttattttttgttgactgggaaacaaaaaatacaacttttgagaggtgaataatatgttaaaagacaaagtaaaggagccaggattaccaaaagaaatcctcatggcttcctgggccattgcacttggagcaattgccccaatgcttgactcaactatggtgaacattgccatcgacaaattaaataaggatttcagtacgacgttggataccattcaatggtccattacaggttatgttttagctcttgctattgcagttccagtatccggatggcttatgaacaaatttaatggaaagaaaatcttaatcggcgcagtcattgcctttggtgtaacttctgtttttgctggaattagttgggatgtttctagctttatcttattccgtttgcttcaaggatttagcgctgggattattactccgctcatgtcaacactcttggttaaaacagcaggtccagagaatataggaaaagttatggctatcgtcagcacacctatgattttgggcccaatcttaggacctgtaatcgggggcttcatcgttcaagctacatcatggcattggattttcttcatcaacgtgttcatcgttttgattgctgcaccactgatgatgaaaactcttccagactttgagccattcaacaaaaatagtaaacttgatatttttggaattatcaatctatccttaatgagtgcagcaatgatatacggaattacaaaagcagcagaccatgcatcatttaacaatagcgaaacaatcctatgggtgggcatcggcctctctttagctgtaatttacatcgtatataatcgaatcagaaaaaatcaaaccgtactccctttaaatttgtttgcacacaagaacttcttagcatccagcgtcgggttattattagcgaatattgccgtcatgggacccatgttaatacttccattgttctttcaaaacttccgtcatttcacggcaatcgaagctgcgcttgcattaatccctcaaggagttgggatgctcgttactcggccaatgattggaaaaatgattgataagatcggtgcaaaatacgtggttattgtcagtctcgtcctttcgcttatcggatctattccgcttatctttatcaccgataaaacaagtatgatttggatttctatcatattattcatccgcgggaccagttttggaggaattatgcttccgttaacaagtgatgcttatacaggacttgacagcaaacaacttccagaagcaggtgtcggtattaatattattgaaaacctcggtgcaagttttggttcagctgttatcgcaactgttgtcgcaactactatacaaggattgcaaccaacgattgcgaatggcttaaaaggttaccatgccggattcttagtatccaccattgtccttgcggtaatcttcatcccaagtctatttctcacacataaaaagaatgcacaataaagaaatctgcatactcgactgccgaacggtttgtttggataacttgtgatacatgtgatgtgcaccagtttcataagcccatttagaaaggcgcttactaatttgattggctatctgttttcttcgatgtctggatctacttcagaggtttcaattacaaaaagagggcaataaccctctttaatacgtttcaatatatatagtgtcagaatccacaacggtaacttctttcacgataaagttaacaattgtttttttatcatcaagggttaagttatctgcaccgattgattgaaaatagtcgatggctctttttagagcattttcacttgagctcgtatcatccaggactttcatttttgattgaatttcgctacacttttcagtaagctggttttgctttttttgcagctcaataatttgcgctttgatttcatctatgtctaaatcatcgtcatcgcttaggctgattagcgttaaaagacgcttgcggcctttttttgttttctctatctctttttgaataagttctaattcatcagacaggtgatttgattgttcaatctctttgaaagaagcatacttttgaggatttgtgatgaatttaaaaatttcaccccatacatgccggttcaatttattctcagacatttcctttccgcagccgcggtcctttgcgccagaataatttttccggcaagtatatacatagtagtctttaccatgtgattttcttttcttccctgtcatggtatttccgcatttcccgcatctaaccaaacccgataacaagtaattgtgagggctaatgcttaagtgttttcttttactttgacctaagagttcttgagcataatcccattgttcagctggaacaattgctggaattgccacagtgatttgctcctcttcaggccttattttgattatagatttgttccctgcctgttttgaaacataggaaccctctgtatcatatttatactgtttatgttcacccttataagaagagttcattaatatctgtcgaacaacctgcctgtgccatactttggcacctttttttgttttaacccccatctgagttaaatgtagagcaataccatttactctgccgaaaaaagggcttttatgatcggtgaaatagttaaaaatcatcctaatgatttttgcttcctcttcaaaaatctcaagagttcttttctctttaacaaatttatagccatatagtttggaatctttaataatcatgccttttttcattttttgaagtcggccgcttgatgtccgttctttgattttggctttttcaaattctgagattgctccacgcattgcgaaaaataattgaccttctggagaattggcgtattcaccatttacaaataccaagggtatatttcgctttcgcaattcgtcatcaatgataagctgattcattaatttccgagaaagacggtcaggatcataacaaatgacttgacttataagtcccttgcttgcatcctccctcaagcgattcaaagccggacgttctaaaagctccccagaaaatccttcatcggcatacttcagcacatccttagtccctgctttctttatacaggcctcgatctggctgtcgatgctcgatcccttgatcgcttgttcctcggtcgatacccttacatatattgctatcaccctggatctccttcctataaagttttattaaataatgatagcaatcgttaatgcatttgtcagcttgcggtccctcgatgattatcaccttcataaaatgcatcaccccttgggtaatgctatgtaaaggcggtttgtcctaatgaaatcattttcaatgagtgtgaaaaaagcacttaaaaaaccgatagttaaaacgatcggtttttcgacatcgcctaggccctcaacatagtaaattcatatcattagttatgaaagcttattttcactacactccttatatttaattgccatcatttctatacgatttatatgaaatatggtaaaaaatggttagctaaaacgataaagataccaacctgttcatttggtatccccattcttcaagtacctcaataaatgtaaaccactgaatatttttatgacattgcacgtgtcaatgatgccaattcatgaactcataaaggagatttaataaaactcccaaaacaaaagggatatcaatatagttggtatcttctttattagtttgaatccctcaataaagtggatgcttatcataattacaaaaaactttatttgaagcactgaagtcattcattatattgttgtaaagataacactatagtccccttcttacttcataaacggttgttatatttaacttcttaattaagggacattttctgtttttagattcgttatgtctttttctgttacgtaaagaatggagataaaccaatagaattaagtgagctttaaatgcttcaaaaagctctgataacaaatctctttataatattcatgtgaatttatatcttcactcattagccattgaatgagcaatccatctacaatagatcgcattgtttttgaagctttttcaacatctatactttggtcaaatacgcctgtttcctgtccgaaaataataatgttagatgtggtgccccagcactgttgataaaagctatggttaattttcctgtacgtttcatttcgggttgcctgagacaagaaatctaaataaaccttataaaacttttcattttcctcgggagagacaaatattgaatttacataagctttcaacttatctagtggcgtagattccgaatccactgcttccaattcatgtttataaattttatttgtaagccactcaagtagttgagaaagggtatcttccttattatcaaagtaataatgcacgacgcccttactaactcctgcgtgatctgcaatactttgtagtgtaactgaattataaccttgtgttgacacagcttggaaagctgcccttaatatctgattctttctttcttctgcttttttcttcataataaacctccagaaagctaaaccttcaattagtatacaacagttcatgaaatccacacaaaattattccgaccagacaaaatagtttgaccggtcagaataatttagtatactaaaagtggtttcacatcaagatagcatataggaggatttataaaatgaaagacgaattcaaggctctagttgtaaacaaagttgatgatgaattttcaattaaagtaaagaatgtttctccagcgtttttaccagaaagtgatgtccacatccaagtacactactctggaattaactacaaagatggacttgcagggaaccccaatgggaaaatcgtaagaaaatacccatttataccgggtatagatttagcaggtgtagtcatttcttctaatgatcctcgctttaaagagggggataaggtgattgccacaagttatgatataggtgtttctcattttggcggttttagcgaatatgcaagtctccctggagactggattgtacctttacctgataatttgaccctcaaagaagcaatgatagtaggaacagctggcttcacagcggcactatctattcaacgtctagaagaaaataacctatctcccgaaaaaggaaaagttctggtaacaggagcaacaggtggcgttggtagttttgctgtttcattccttaactctctcggttatcaagtagaagctagtacaggtaaagaatcagaatatgattacttacgaaaacttggagctagtacaattatttcacgggatatgacctatggagggaaggttaaagccttaggatcacaaaaatgggcggcagctgttgatcctgtaggcggggaacctcttgcctctatcttaagccaaattcaatatggaggttccgttgctgttagtggattaacagctggaacaaaactgccaactactgtttttccattcatcttaagaggtgttaatttacttggaattgattctgtatattgtccaatggaaacacggttaaaaacatgggatcgtgtagcaacagattttaaaccatctaatttaaaggaatttatatcacaagaaattactttagatcaacttcctaacgttcttcctgaaatattggaaggacaagtaagagggagaacgattgtaaatatcgtatgattattcatcagaactcatccagttgctaaagatgaaacaatgtcttaaaggtctagtaaagggattctcaacaggaattcctttacttattatagcttactttatgttaatgcaaaaatataaggagtgatcctccccattcagcttacacagtcttaatgatatgaaaacgcttattcatcgtacattataaatgtggctcctagtctggagtttcgttatgggcaaacaaaactcaaataaataggaacccaccttgtcacaataaactcaatagactaatgctgagaagtctccttacttacttcaacatgctcaaaaccctgtaaacaggttcccttggggagaagaaacatttgaaaaagcgaaacgcgaaaacaaacctgttctcgtatctattgggtatagctagctcgggtagctatacgcacatgtcattggtgccatgtttcttaaaataaccacaaaaggcaaccagtttcggctgccttttaataattttattggaaatttttagaaagctagattcaaaaactttttctcttctaatttaaatactgttgttttttcttttgattcattccattttatcttgccctctaatttgtgtcacttaatatcttcctcgggcatataatcaaaagttgaaacgtgattggtttttttcccaccgtctacaaaccgcgagttctgctgattaagaaatggaaagataaaaagctagatcaaatcatagaaacaccttattattgcctttcaaaatcctctgcataaatgaactcaactttttgactgctctcttcgtattccccttaaaatttaataatcactttcccttttggccgtccatttgcgactagttctagcgcttcatttacgttgtctatggtaaatagtgttggatgaattgctggaacaatgttgttttcttcaatgattttagtaatctctttaagttgtgcaccgtcagaacgaacgaagataaaatagtatcctacgttttgtttcttggctttgcgatcatactttgcgcccgcaagggaaaatagcatttgtttccacaatggaaaatttcggtcttttccgaagcgtttatttggtcctgtacggagagagagcaatcttccgcccgatttgatgatactcaattcactgtcaaattctttaggtcccagtgtatcaatcacgtaatccacattcgacaacaagtcaacatagttttctgttgtataatccaaatattggtctgcacccatttccaaagtgcgttcgcgcgcctctgagctgccgctaacaatgacatttaggcccattgcctttgcgattggtacagccatttgaccaaagctgcctgatccacctggaatgaagacagatttacctggctgtgcctcaagttcttcatgcaggccttgatacgctgtgagtccagccagtggtgcagcagcggcttccacgtaagacaaattttttggcatgggtgcaattgcggcagcgtcaattgcggcatattccgcaaaagcaccaattttttcgagggggagacgtgtatagatggcatctcctacgtgaaattctgttacattttttccgactttttcgataactcctgtcaattcattaccaagcgttaatgggaattcataatcttgaatcagtttcacgctgcctgtaattattaacatttctagtggattgactgccgcagctttgacctttaccaagacttcgttttcatcgatttctggaattggaatgtcattgactttggcatggatattttttgaatacttggtgatctgagctgctttcatgagtgttttcatatttttatcagcatcctctatcatattacatttattaggtttttacctttttatataatcgtttaggtggaggggaatcttactttaagcgaagtctgacttccaattttatgattaacccgccacctaaacattcgtgatttttagaacgatcattctcaaatgattaaattttttaggtccgatactgtaaataaatgtttctcatcttcctagtgttattgatatagaacatcgttattatatagatttaataacttgaaagattacatctctagaatcggatagatttgatctcttaattgaaattcatagttttcgtctacaattcctactacttgattactatcataaagctccatcataaaactcgccacttgctcaactgtgtggtacatcgggatatttgctttgtaatcaaattctgtcgtatcagatgcatttttcatgaattctgtttccgtgattgctggtgctaaaactttcaccttcattttcgcacctttgcgttccagttcttttgcaagcccttctgtaaatgcactaacaaagtatttagatgcagaataagtaatactgccaacagcaattgcatatccgagggctgatgatacgttaattaactgagttccctctacatccgaataatcacgtacaaatagtgtagaaagaattgttaaggattctacgttgacacgtaacatggtttccactttatctaaattctgatccgtgacagaagaagattcaccaagcccggcattattaatccaagtctcaatttgatattcctttaaattatcatacagtgtgtatgcctgagctgtgacagataagtcacatgtacgaatcataacatccaaatcgggattaatattctgaattgttgatttaagctcttctaatttatctaatcttctagctacaataattaagtttttgccgcgagcagctaacgctaatgctgtctcatatcctatacctgagcttgctcctgtaataactgtatacttcatattattctctcctcgaaaacaaatttttttttattagatcatccatataacaaaatagattcagtctaatgtcgacaaagtcaaatcaataatgttttctaatttttcctcatcatttgtcgtttttgctaatactcgtatccctacgagtgaattatgaataaattgagaaagccctttgatatcatagtgtttagaaatttctccttgttcttgaccatgtttcagtagatcaaataagaaggtttctgtctttataaaagtctctgtaacttttttagtaaacgatttattccattacgagatcttggctagatgacagatcataatcaactgccactacactcctggtcaccctcaattaggtcaatgccctgttctttgctgtgtggatctgaccatacgggtcaccattttgcgcggcatcaaccgtggaaggaatgccatgaatcggtttcgagccccgggcattattaacgtcttgccacgtaagaagcctcggtacccttcctcagccacctgcccggcctccatgatagcaccactctggaacaacttcgattcaccaatacccgaacgatcaacgaagccggttgacgtcagtcccggacatagagccgtcacagtcacccctgtaccgctcagttcgttctccaaagcctcggtgaacgacagcacgtacgccttcgttgcgtagtaaaccgacatcataggtcccgggaagaaagccaccaacgaagccacattcatcacgcctccttggccccgtttgaccatatccggcaagaacagtttcgtcataacagtcagagccttgatattgacgtcaatcatattcgtctcttgttctaactgcgtctccaagaacgtcccgtacaaaccgaagccggcattattgacaagatagtcgacgacgatccccttctccttgagctccgcaaaaatctcctccggcacaccgggtgacgccacatccttggcgatgaccgtcgcttgactgccatatcttttccgatattccttcgcgagctccaaaagcttaccctcgctacgcgccaccagcaccaaattatatcctcccttggcgaaacgatccgccaactctttgccaatcccacccgataccccggtgataagaacagtttttttcatttgacagcacacctccatttttagtttgaacttttaaaacgttttacagcgtttcttactgcgagtttttactatggatgtatgttatccataattcaaatttttgtatcaagaggatttatacttgccgcatatatctcaactaagacctcgccattatttattttgggcctagggaagtaaaaatttggtttttcgccgtagttttcaatcgctaaagctttcgttacaatcctccacatttttatttaacgcacatgtatcttttcctaacgaacctaagaaaaaagaatatgaatatcccttccctagatgggatattcatattaaataaattattttaagaaaggataatctgtataaccttcttttcctcctgcatagagcgtgttttgatcaggttcgtttaggggagcacctgatttaatccgttctgcaaagtctggattagctagtacccaagtgcctactgtgacaacatctgcaagattattatctacatcagacgaaagttgatctagaggacgacctggacggttaacaagaagtgcttgatcccaaagttgacgcacatcttttaggaattgctcgtttccaaagtgcattaaatgcagatatacaaggttaagcttatttaattcacttattaaatagcgatacatctcaaggctattttccccttcatcaatgccttgcagtgttccttgaggagaaaaacggatgcctgttctttctgctcctatttcatcaacaactgctttagctacttcaattgcgaatcgagaacgcccctcaatcgtaccaccgtatgcatcttgacgatgattggagttttcactaaggaattgttggatcagataaccattcgctccgtgaatttcaactccgtctgcaccagcttcaattgctgaacgtgctgctaaacgaaactcattgataacatcttttatctcaagctcactcagttctcttggtgttgggacttctttcattccttctgccgtgaaaatttctacaccaggtgcaatagctgacggtgcaactgcttggcggtggtgaggtgtgttatcagggtgtgatatacgtcccacatgcataagctgaataaaaatatgaccgccttcactatgaactttagaagttacttttttccaccctctaatatgattttctgtataaataccaggtgtattagtgtaaccttgcccatcatctgaaggttgggttccttcgcttataattaaaccgactgaagcacgctgaccatagtactctgctactaaatcgctcggcgtaccatctggtaaagctctatttctagtcatcggagccatacctatacgatttttcaagtcaatgtttccaatacgaactttttcaaataatctgctcatatgaatactcctttttaataaaaattagaatcaagaaataaatttacgtgttctgcaaatagttctggaaattgaaacagatgcccgtgaccagaatcaggatatataatcagctgtgctttgggtaatttctctgctaagatgtaactgtttttagttggtaccattacatcattaacaccattagtaacaagtacagggtgtttgatgttttgtaaccattcataatcatgattagatttttgtttagcccattttgcaatggcttgtaattgtgcctcttttacttgttctgaactgtttacttttttctgattaaaaattctttgtagtgaagccattcctgcagatttacttgtttcggtttgtgcgtagaaaaagaacataaaatcatttattccatcttcttccgttccgccgtgacgattcattctttcaaaaatctctggatttggattaataccagattcaggcgaagtacctgccataataatttttcttactaaatctccttcttgtaaagctagctcttgtgcaaccataccaccaatggaaaaaccaagaatgtcaacttgttctaatccaagagcttttataaatgttgctgtatcttttgccatatcagtaattgtagtaggcgttattccatctgtctcaccaacccctttattgtcaaataagattactgggcgtttatttgcaatcggttcaagcatgtctggatcccagttttccatcgttcctctaaagtgaacaagaaatactagcggtataccatcttgtgtaccaaattttctatatgcgtaacgagttccatctgcttcaataaattctgattctgatggtattttaaagtttgtcatttttgtgttcctccttagaaattaaaaaacgattttataagtatgcattatgatggtttgtttcatgctaattttagaatgaacgttctaaatagggtaaaaaaaagaaagctagtccaacactgaaagtgctagagtaatgatgccttctaattcttttttactgtaattagtttttattagtactcttatacctaccaaattgttgtgtaagaaacgagatatgttatcagaatcgatttcttttgatatctctccactagtttggccccgttttataaggttattaaacatatcttcagtacggttaaacatttttgtaactatgcgtccaatttctttgtccaacaaagataattcaatggctgcatttactgatagacaaccttttgggtattgttcaatggaattcagtacgaaaataaaaacatcacgtatcgcctgtttaatggatgaagttctgctaattatgctttccatctcattgacgacgagctcttcatagtgattaagggaagctaaaaacaatgaacgcttgtcaccaaatgtgtcatatatactcctgcggtgtatccccatatgatttaccaaatcttgcatggatgttttttcataaccctgttcccagaaaagctccattgcttttcttaatactgctttttcgtcaaactctttacttctagccatttttttctccttaaaaaaatcaatgaaccaatactaacaaaaacaaaagtcataatccattgtagaatgaacattctaaaatgaactcatgaatttcaaaccatgattaaataatatcctttttagaacgataagtaaagaattataaatttaattatcaataatctctggaacaatgtgcattctcatttgagtagcaaaacagttagatctaacgtgtttcaagtatagcaaatttgagaacgatcggtaaagaatttataattaatcatgtgttttatatggctatgcgtagcctgaatttttatgaatatcgttccattttatctctactcaaatcagttctgcaatgtcactggtggcataggatcttttttatattagatgcacacaacaacttcatccaaatacaaaaaacgaatgggaactatatactagttgtttttttatttacagtctaaacaaagtaaaggaagtattacttgaataacttcttttctccaaacgatagctagccttggcctattctaaagaacattgtcatttttgcaaattaggaaactaatttatcatagctagccttcaattaaacgttttaacttaaactcagtttcagtatcctcaactggagtatagacgctgcatcttaaatcagtatccccatgcacttgtaatgaagtaagattaaacaacattttacctaccttagcatgacgaaactcaattaatacttcaggagcagagcttatctcattttcgttccaaattttacgaaactcaggatatgcctgttccatttcttgtataaattgctcataccagtcgtcagccacatactgtccataatacgttctaaatattgcgatatatcctctaacaaaatgctcccaattcactgctaaacttttaaattcctttcttgcgaataataagcgtattatattcctttctgccgggatgatttgttcaaaatccaaaaatacattagctgctgcttgattccatccaacaatctgacttcttctatctgatataatcgttgggcaataacgcagttcctgcaaaatttttactaaagccgggctgatttccttctcattctcatttctaaaaggttgtttcactccttcctctaatgctagagcatacaaatatctcctttcatcgttatttaattgtaatgctctagaaatagcatctaataccgaagtagatacttttatatctctaccttgttccaaccatgtataccatgtaagacttacaccagctaattgagccacttcttctcttcttaatcctggtgttcttctgcgggttcctacaggtaaaccaaccatttgaggagtaattttcgaacgttggttctttagaaattctgataaagcttgaagtcttgtttcaggtttcattaagatctccctttaaaatagtattaattatactaggataaacaacaacttgtaataggataacacaatagctaaagttaataaaaacaaggagggaattatcatgaaaagagttgtcattactggaatgggagttatttctccactaggaaatgatgtaaatagcttttggaatcaactagttaaaggacactcgggaatatctctaattgattcttttgatactgctttttataaaacaaagatagctggaatcgttcgtgatttcgatgcagatgaaatattggggagaaaagaagcaaaacgattagatcgttttagtcagtttgccttagcagcagccgaacaagcattagaacattcacaattacagttagataaggttgatcttgaacgtttaggggtatatgttggttcaggaatcggaggcatacaatcgcttgttgataatgtgaatgtattgaataaacgaggtcccgcgagagtaagccctagccttgtaccaatgatgatttcaaatgcagctgcggcccaaataagcataaaattaggagcacaaggaccatcattatcaccagtcacagcctgttcaatcgggaacacctctattggtgaagctttcaatgctatccgaaatgatgaagcagatattatatttgccggtggagcagaagctgcaatcacacagatttctttggctagttttggaaacgcccatgcactatctacaagaaaccaagatccaagtcgggccagccgtccgttcgatacagatagagatggctttgttatgagtgaaggcgcaggtatcttagtattagaatcattagaaaacgctattcttagagatgcgccgatattatgtgaagtagtggggtacggagctagttcagatgctcatcatatggtagcatcacacccagaaggtaagggtgcctacttggcaatgaaaaaggcattgagaagtgcaaatatatcaacaggtgaaattgatgttattagtgctcatgcaacaagtacacaggtaggtgatcgttcagaagttctagctattaagaaattgtttggtgaacattcccgcaaaattccaacaactgcaaacaaatccatgactggtcacatgcttggtgctgctggcggagtagaagcaattgctttagtggaaagtttgagacgaggaattattccgccaactattaatgtagagaagcaagatccagattgcaacttagatgttgtatcagaagcaagacaccttccattgaaatatgggctatcaaattcttttggttttggaggacataattcagcaatcttgttaaagcattacgattgaagacccatctttatagttcaaaggtgaaataatgaatctatcaagggtttatagcccttgattttcattatggaatacctcacagacaaatgatgacgggcctcagctatctggtatattaaatagaggaaagagaatacttaaaaaaacatttagaaagaaggtgatcccatgccaaataaaagtaaccccaatagattaatcaatgagaaatcaccatacttactccaacatgcccaaaaccccgtagactggtatccctggggaaaagaagccttcgaaaaagcaaaacgtgaaaacaagccggttcttgtcagcatcggctattcaacctgtcattggtgtcaagttcgtatagctacacattatttaaaaaaggacacatataaatatgcatccttacctttttattaacagcaagagttcgttgtactatcacttggtggtgttacacaacaagaggaggaatcttgtttttgattctcgctgttcgatttggtatagaaaaattcccattcattcctatttgggtcagtaatccaaaatttatcttggactgcataacaacaagttgtatccatttcttcacgtgcaaaaacccctctttttcaagcctttccttgtgtttcaaaacttcttccaaactatctacttggaatccaaaatgattcacttgatttcccgtcacctcgtctacgacatttaaagtgaagttcaatccaggagtctctaatagaaacttagcatagtctgtttttactttcacagcctttactccaaatactttttcataaaaatcgatcgatttctccaaactgacaacgttaacccctacatgaacatatttcattttaattccccctctaatatattaatcaaaaaaatttgatttaatgactaaaaattttttagcaacaatctccttcacctttttttctaaatacacaacaaagctcttctgataataaactatttacttcctcatcatttaaatcataatagctccatgttccctttgtctctttcgttattaagttggcatctaataaaattttaagatgataagaaagtttagattgtgttacctcaaaaatctcagtcagatcacaaacacaggtttttcccctttgacaaagttcatacatgatctctaatcgtttctgatcagcaagagccttaaatttttgttcatatttccgaagtagttctgatttcgtctcatccattcatatcgccttctttaatcaattttttttgattaattatgaaacccactaaaagctagtgtaaccagatagaggttttctatttttaatattttcctccatcgctactacaacaaggttacaacttgcttttggtggcaagtcatgaacacctaaaggagaggagatttaattaatctaaagcaaaaaatacaccaatatgatttggtatcttcatctaaatcgagtccctcaacatagtaaatcttcatctacaaaatactttcattacttaacatatatttaagttccttaatacgcaaaaaagttattgcggtctcaccgaaaatttaaattgcggtgccctattgcctttttctgcgaaagaaaacttgttaatatttacattactagtagagttaagggaagggtgaatatcttgatatcaatcacatcagctgaagtgggaatgaagattaatgaatggcataggcatattcaaaaattcaatgttacggatgctgaaatgttaaaggctgaaatagaacgtgatatagaggttatggaagaagatcaagacttgcttatttattatcaactaatggcctttcgacataaaatcatgctggagtatactctgccatctgatgaaaatcgaattgaactttcagaatatttaaagaaaatcgaagggcataagaagaagctagacaatatgcgagcgtattattataacttcttccgcgggatgtatgagtttagaaacggtgaatacacaaaggccattacatattacaaaaaagctgaacgcaaaattccaacgatctccgacaagattgaaaaagctgagttttattttaagttatccgaagtctattatcatatgaaaatgactcacatctcaatgcactacgctgaactttcatacaacatctataaaaaacatgaactttattctgttcggcgtattcagtgccattttgttattgctggcaactacgatgaccttgaaaatcatgaaaaagctctcccccaccttcaagaagctttaaaaggtgccgagctgcttaaaagtaaaaatactcacatctacgccacagcatttttcaatctcggtaactgctatcacaaaatggacaacttaaataaagctgcacgttatatcgagcaggccttggttcaatacagaaaaataaactctgacgtacttccgcaagcttatcacgacctagcgttgatttattttaaacaaggcaaaaaagaacaagcaatggattgcttccgcaaaggaatcagaagtgctgtagattttaaagacgaactttttatgaacttatttgaagcattagacgttctttatataagaaatggcgatacacctaaactcctcaacattttttctcgtttagagaacggcaaaggatacccttatctggaagagctggcattgttaggaggcaaccttttcgattataatggaaaaatagaggatagtatcatctgtttcaagaagatggtatatgctcaaaagcaaatatcgaaaggggaatgcatgtatgaaatctaaattgtttatcagtttatccgccgttttaattggacttgcctttttcggatctatgtctaatggcgaaatgaaggaagcatcccggaatgtaactctagcacctactcatgaattccttgtttgattcgataaacaacattagttctgattccctttagccgtttcataacggctttttcttattttagacatgaaaagcatttcacaaaagctggtcaaacccaaaaactagaactagatcaaaagacacagatcgaatgattcatttccaccctttgatccacataatacttagtttcatcattcttccatggtaatattttgttatataattaaatgagagggtatgaatatgaaagtctttgaagctaaaacacttatgtctgaagctacagaccgcgccaaagaatataaagaactaaggacgcaaatggtcaacttgagaaaagctttacaaagcgtcgctgaactggacgacagcgagttctcaggtaaaggcgctaataacattaaagcattctatcacgatcatgttggtgtcactgatcaatggatcgactacattgacatgaaaatcgcattctttaacagcattgccggagctgtcgaggacaagggcctctctgatgcttatattgaagagtcttttttagaacatgaactggctaacgcccataaaaaatcaaaatccatcatgtctgaacagaaaaaagccatgaaagatatcctaaacgatattgacgacatccttccgctcgacctattttcaacagaaaccttcaaggatgagcttgcagatgccaatgacaaacgcaaaaaaacaattgaaaaactaggtgatcttgacgaagatttactgacagaatatgctatgtcagaaccaaatgaacaattcatcaagtcagacttccaaaagctccaagaagcaacgggcaaaggcaaaaacgctactcccattcactacaacgccaaggcgtaccgtgagagtgatatacataagaaaaaaggcgatattgagaagcgaacggaagcttatttgacgattaagaaagaggaagcgaaggaacgcgagataaaagacttaaagaaaaagcttgcgaatggtgtctcagatccggatgagtatttagaaattgcgaagaagatcgggtatgagaaccttgaacctgcacagttacagtatgtggtgcagctagaacaagcaaaacagctgaagtccgtcggtgaaagtgtaatcaatgcgggtaaaacggcattggatatcatcgatggggttaatgatgggcttaacgatgcgattgatgatacgatatatggcatcaaggacttggttgtaggcgcatgggaattttcacagctccctatggaactaaaacttgcaaaaacaatcacaacagtcttaagtgtcccctcctaccctaaaataatttggacaaacatcgtcgattcatggaatgataaaatgataaatggcaatgcatatacaagagcacattatatcagttatgcggtcggtaatatcgttggtccaaaaggtgcaggtgctgcagtgcaaaccactactaagctctcaaaagtgggtaaagtggttgaaggtggaacagctactgctcatgtcaataaagggataaaccaaggcaaagcttacattaattctattgttagaaataagaatgatcttgcacttgtcgggattgcccaagacatcgataatacgtataatgcaaagaatacgcctttattaaaaaggattattgaagataaaaaagagagtgtacttagaaaatccgagacgtctaacaacatgggtataggtaatgtcaaacaaggtgatagtacccctctcgcacctggtggaggattagctgctcatgaggcaaaaggcgggcatcttatagaaagacatgttgggaagaccgacgaagaactaattcaaagacttgataagagcaaaatgagtaacaagaagatatccggttcatcatcatttaaagatagagcaactgcagaaagagttgctaatagtgctctcacaaataataaagcgaaaatagaaaaatggttaaatagtgatgtgaaaaagcctttagtactctcttataaagggaatgaagttttaggaagaggaataccaaagggagaagatacaattactgatttaactaatgctaaaattatattgaaaaagaacaaagatggtagctttatattaactggctacccaacgaggtgataccatgatagatacaaacatttccgaacctgtttttcaatttctaggaggtatttttcatcaagatatagaaactccagaatcagcactggacgaatacttagaagagattccaaaagaagagcaagaaactgatatagtagcattaaaagattttattaacagtgattatacggatgaagaaaagaatgattttatcgatgaagctgctgacggagtagacattcgtagttacggagtatctccattagtatggctcgaacaagttattcaaaaaatagaaaagaacattgaaactttataatccataaaaggtcccttgaaaattcaagggaccttttattacttcaaaagccctttaatttttgctttcgttttcggtccataaatgccatcaggatttagtccattcatcagctggaaccgtcttacggcatctgctgtttttgggccatacacaccgtcaattccattattcttagctcctttatccgggtagaagtatagtgcagccagtgctttttgaatttgccttacgtcgtctccttttctcatcgggcttgtcactttatagatgccggaaggcagcgcatatgacgttttcttgctgcttaattttgttgttttctttttagctgtacatgttttacttgtgcttgttttcccacctagcgcttttaattctttttcaatggcaaccttaacttgattccatcttccctctgacaaaatacggtgcgggcaatacttaccgttccagtcttggtgcttacggacacgatcaatgccccatccgcgttctttaagtagctgcgccacaaacttaatagcaagattttccgctgccttatatcgcgcccctcctgacttgctataacaaatttcgacaccaatcgacttacgattgcctgtaccgtttgttccatctcctgtgtgccaagcgttacgattcgttggaattccttgaatgacttgtttatcgtctactgcaaagtgaaaactcgttgagctagagttattcttcatgtaagaaatctcattggctgctgaagcatcattcgcagtgttatggatagtgatatactcagctttcattgggttaggacatttcaatccatattttgatttagaaactaaattctttacaactttgatggccatatatcctctctccttctgtctgtgtaataaaaaaagccactggcttagccagcagctctgtcagcgttattcttactctgttctttttcgttctccattgtttgtaatcgatctgttattgttgatgggattttaacaccgatctgtgctaagttttcagttattgacaatccttcattagcgacagcttcctgacgcacgtaggtaaaatatccctatgtgtgtcgtacacctctctgataacaagtgcagttcgtttttcttgaagcaatttcagtacaattttgagtgccacatgatagcttttggatgatccataaccacccacaagaaactgaaacttttgattccaatcaaagagaaattctttaaaatgtgggtttacttgtttaatcatttgtcatcactcttgtttacaatggtgatctcaaaaggtttatcttcttctgtaagttcttcagtctctaatttcttcttgtctatacttaaacgcatatgctctaatttaaggcgtcgttcgtcttccgagtgggctaattcatcaaactgtttaataaagttcctgagctctgccattgccctagattgagcgttcaagaacgttgcatgaggatcccaagaaaattggaattcatactcttcctcttcgccttcgttcacctcagataggatagtctttttctttttcagttccttaatcatttcctgcttatcagaaacgaacatgattttttgcgctcttataattgcggcatattgaatctgaatttggtcccatatcatatcaacaggggatcgctcctgtattccttccatgatcgatagcgtttcttctggcaggaacttagagaagaatccatgagtcacagcgttttgatttctcagtggagctgcaccacctttatttcctaatgcatttttatttccaagcggtgctcttcctcccttatttccttttgcatttttgttccctttaggtgcgcctcgacgcaaaagagcgctccctttcgatttaggagcgctcccttttattttttcttcccatttatcgtttgctttccattttcggacagtgctacttgttacgtttaattgctcagcaatgtcttttaacttcttactcccgccgctctcttcccacaaacgaaaagctttgtctctgcgtggatctcgtggtcttggcattacatcttacccacctccggatctcatgtttgagtttgtgtttgttttaatagtttttttctgatgtgtctactactgcacctttagacaaaatattcattttttcttatttagacttaaatctatgtcgaaaattattgtttgacatatcttatactaactccactaaaagaggtgataacatgtcaaatggttacaatagctccttcgtgttagttgtggtgttgttcatcctgttaatcattgtgggtgcttcattcctttattagtcttgaaatattttaatctactattaaaggaggtaactatatgggatactcgaatggttatggtagcactttcgcattaatcgtagtgctattcatcctgttaatcattgttggtgctacattcctttattagtctttaggcactttaatccaaagcggccttttggatttcacctccctgtacgaagacgccataagaagtttttatggcgttttgctatgttattaacaacacctttaaattgtcaaaataggatagacaataaaagagaggccactttaaaacctctctttttaattaattgttttcggaaatccttaacaacaaggttttccgcagtacttatgatgctcagtgacaggatcgtaacttgagtaactatgcggaaagtaatgaacatgctcataatgttgatgattcacgctagttgtatgctgcggatgaatgtgaggaacaattgtatttgagaacgtatgatgttcacaacacttagtcggatgcaaaattggaggtaaaattttgcaatgatgcatattttcttctcccttcattattttttatctgttataaactatgttcagaagcatctaatagtactattacaaccacctatttactgctccatgaggatttatcaaacaaaatcatgcacatcacaacaaaagctgtatagattacttattagagcaactctccactccacataaataccccatcgctctgccccacgtttctccaactctttatgatcaacgtggggttttattatgaaaagcgctcctcaatatgaatagaacccatttttcttggaaataatcctcctacgaacgaatgcacccgttattagtgaattcgctctaaaagcctcgtttgatagagcccattcaacccttatcatcatcaaacatgaggctttattttgtttttgtcgggaatattaatttttacgcaatactgctggtgttttatcacccgaattcactgtataaaacctcccagttgagttgatcctcgcttatcgctggggggttttctcattccatgaatgtagtggtgacgcaggaataattcgccgcgccgacctgcctcccattttacactacagattttttcggattcaacaagcgctcaaagtggcaatcttggcataattggctgatcaactcgtctttcattttgcgtacagtttcccttgaaatgccaagatgaagacctattgcacgataactcatcccctccatcatgcaatcataaataactttgtgctgctcccctttgatcttttctgcccccaactcaactgcatatactcgttcctcatagtacttaagacgtttgaaaagacgttcctctctcatatccatttgctgcaattctgcctgactcttcccgggacttccttttggcatagctgcttctaatccatattgtgcaacgccccaatttttcattgggattactgaaccatagagcactctctgcaatcgatgaacctcttttgccatccagtgatagctattgattagattttcaatatcttttcgattcatgattgtgttctccttttccaaataaaaaacggacaccaaacaaacagtgtaatactgtaagtttagtgtccgcaggctttccgtcttggacttaagtattgtttttttctattttaatctcgataggtttatcatataaatcttctttcttcttgatcatagttttactgcataaattgtggttactttcatttcctaataaaagatattctctatttatcgaatgtaatatataccatgtttcttttccatcttttatgtaaactttcgtagttttattaaaattaaatattggttttaaaagggctggaatatagcaagaaaaatatacagagataaaaaatgcaacaattttttgagtatttgtctcaaattgaaaagacaaaattaaaccattgagtccagtataaaaatacaaaaggattattaaatatattattgcaataaagatttttagaggtttacccttaatcttttctatgaagatgtaaagtaataaaaatatggacactaacattataccagctatacttatccaccttataatctcaagccaattaaagttgggattataacttgaaataagctgagctattgagacaaaaccgagcgtccagatcaaaacagaaatacaatatatccccaaccttataattaataattgttccttggagtaaaactttttttcaacaatacttgaagaaaacatagtgactggattccccgctcttataagttgtactattaaaaatccaactgcacttattgcaccaggaaaccctaaagaggctaataattgtttaaaagtatcttcgattttaatcaccactcttaaatttcatagttattccattttaccaatttacgctctccttctcaacgcctattattagacgtatcgggtagtaaaaagttgattaatcacctggttttaaattcaaggggataacaactgttggttaattttattatgctacacaaaaaaataattgatcaaatgctttttacctcaccttaaatcctatctcatgatcaactcttgcaaagctcccctttacagtttgaataacagtcttaccgtgctcaggagcatctaagacatgagcagttccctgattcccatctaaaacaatgatctgaacttttcctgggtcaattttctgctgaatagtgaagtcttttttgacgttaatttctcttggattgtacactcaaagcgccccctatgttatgatagaagtaccagttcatatcaagaacactgaggctaagcgcttcggtgttttttatttttaggcagaaacctcttttatcatgatttccaccctcggctcttcgctataaaacttactgactttcaaatccaccacctgattatcatctttgtatatcaactgattcaaagcactttcacaccctttacatagttatcaacatcaggctttgtagtaggccgcaaaagaccattttcagctttctctttctttttttttgagtttgaaactgacttaggcattggtctgtacactttgaaacaggaccagtaataattgtttctggtcgatgctgagacgcaaccaaagctacatactgcttaaaatactttgatttcgctggatttcgcatatgcaccttcccatttctcgtattgatccacgcggctgtccttgtgcgactggctcaccataaacagtgaacttaatgcaatacaactgttctttacctcccgtcaagctgttcccatagctcaatttctttttctattctcggtgcggagagtaaaattgccaacagagacacgactgctttaagcactcagcatccgctccatttgctttattttttcctcaagtaaacggattgttggtgtaagatctttaccttcagttggatttgaaggtccaaatatataaagtccaccaattactttcacattcgtttcctccttcattcccaatcaccttacctatgatttaattgcattcgatcgcctttaataatcactatgtaatcacgacacatctggtgaattcgtgaaccaagagcctcgtctatatccaaaatctcatcgactgttaactcagaagaaatcagcaaaggcttatgattcaaataacgataatttaagactgactggatttgttcaacctgccaatcggttgcccttggctgactgtttattggtttgaataagtcatcaatgaataggacttcgacctttctcatgacatcgagttttacaactaagttgtcaagttatgccagcaatacttatgataatcttctggaatcatggtacttgcaaggaaagaaaaaatgggctcttaaatccgtttaaatctaaacacaaaagaaccgcaactggcggttcttttagtatatattcctatttgacttcattattattggacagtaccataatcaaaatcaatatctttcttgtctaaatccccctcaaaatttttagcataagtcattgttaaatgtacgcttttatctatccaccaagttccatcatcagtattagtatcccaagtaacatctatatctcttcccaaattctcaaaaaacaccaaatttccaacagctactgtttttccgttgattttgtaatatattagaacaattttcttatcaaatatacctgtcccgtgctttacgattgttaaactataaggcttattaggacattgctcttcaagtataacttcaggatttaaaaataaaacataacaaatgaatagaattggtacaatcgttaacctttttaatacttttttattgatatttaacctcttcaacatagtcctccctttttaacaatccatttcatttgggatacaccctcatcattgaaggtatttcctatgaaaaatgattttgaagctcataggaacccttacatgacagggtttttgttgttttttcattgtctattaagatctaaatcaaaaaaagctataaaaaataaggaatgatacatattatacatgactaatatgtatcactcctttagtttttgttcaataatcgcccccgatagtgggataagaaatagcaaaagaacttgctatttctcaaatacatccaccaaatgttcaatgttagtttgtttttcatacatactaataataaaagtaaaaccttattaaaactttacaacacaaactgaatcgactatagtctaattagactaaaatattgatgtaaagaagggaaaaattagatgataaagtcttttttaatgttggggcagtcgaatatggccggccgtggatttttgaatgaagtagacccgatctataatgaaaaaataaaaatgttgcgcaatggacagtggcagatgatgacagagccgattaattacgaccgtccggtctccggcgttggcctggcggcatcttttgcagatgcttggtcgaaagctcatcctgatgaagaaattggcttgatcccttgtgccgaaggtggcagttcattgaatgactggcatccggaaggcatcctttttcagcatgctttgtccgaagcccgcttcgccctccggtccagtcaaatttgtggaatcctttggcaccaaggtgagagtgacagttatcgttcgctacatgaaacttattacgagaaattaactcttatcatcgagacactaagaaacgagttggaacttgatgaggtaccgttgattattggagggcttggtgactttcttggaaagaccggttttggacagcacgcgactgaatttcgacaggttaatgaacaattgctgcgttttgctaatgaacaacagaattgttattttgttactgcagcaggtttgactgcgaatcctgatggcattcatttagacgcagcttcacaacgcaaattcggttaccgctatttcgaggctttttcgaaaaagtaccatatcctgaaacccatttcgggagaggagcaatcgctgaaagtgaatggtgactattctaaaacagaacagatttaccttcatagtatggatttggcttcgggtaaaatcacgtacgcggaatttgaggcgcggatggcgaaggtgatgaaaccatgattcccttacttatccttggcttgctaatccaaaaccccggagctcacggctatgaacttttggccttaatggaaaaacgtcattacaaatacattgttaacttcacgaaaggttcattttattacaatctgcagcagcttgaagaaaagtgttttattgaacagattgagcagaaaccctcaaccagcgggcgtgaaatccgtaactacaaagtcacagattcgggaagggcagaattcgaaaaattaatgatcaaatacggcgccaaatcggaatatgtgaacctgcaattttatggggcgttactctttgcagatgaattcgacaaaaataaattactggatctgatccaatcacaaatcgatcagactaaaactcgaatcgagctccttgatgaatacctgtccatcactcaagaaattcccggcacaatcgattactttcgccgtatgaacgaaaattcccgttcacatcacttggttaatttagagtggtttgaaaaattgaaagcagaaatagaatcaactattgcagaataaaaaaatgcaaagttaaaaataagaatattagttacctacatataaaacctgtgtcgtagatatttagtaacatcttttatacaggttttatactccttctttaattaaacaagtaatagggttgtcagcacttgcccccaacaagagcaagtgaatcagctccgtgttcttcttttcaatcgctagccgttagtttaattagaattcaaataatccaagacgcggtgaactctttcgctgactgagcaatcgccttcaatttttaacactggacaagataaatctgccatccaatgatcatgcaaagctctacttctgacttccattccagcagtatcatataaagaagcccactctaaaaatgcttttgattgttcatatttactgccaccggctaacacttcatttccataacgctgaaattccctatgccttaatctctcaagccgtatatcttgtggaatccataagaagacgacaaggtcaaaataactttttagattatcgccccagccacacactgcaccagaaagaatccatttctcatttattgttaagtctttttcaagcaactttcgtctttcaggaatttctctttttttagtgaatttatctaaccaatagtaatcatcggtatcaagatgcgtatgaggcaaatgctttgataatgcagcacccaatgttgacgttccgaccccagaggctcccaatatgtgaatattttttttcatacttccccctccttattaagcaaccaaactccctgttgcataaggtacttactattattttgacataaatccctaaagacctttacttttctagagaaatccagatgcgtgttaaaatcatcatacttacgaaaacagtcattattaaacggattcatattccatctcctcagatgcattttcctatgaaaaaagtcttgatttccctataatatttaaacgaatccaatttttagattgtcgtctttaaggaggtttttcatcttgaggtatacaaacagtcatttagaggattggattgaaaacttatacagaaagattgatattacagagcctgaacaaattaattttgaacggattgccgaggctttagatattaggctgtcgtttaaacctgttacaagcttcgcacttaaacacagcggaatttataatatatgcttggacagccgtaaaagccgaactgaacaatggtatgattttgctcatgaattttgccatatatatagacatgaaggcgataaaaaaacaatgcctgcaacctggactgattatttagagtggcagtccaattattttacatatcacttttgcattccaactttcatgttgcgtaatattaatctttcgtacatacaatcccatgcaattgaaaatgtagcttggttatttaaggtgtccccttcattcgctaagaaacgtttaagcatttattacaggaagctgactcaacatttatttaatcaaacagttacgggaaatctgtgcaccccccttttgtaattaataatgaaatcctcatgcatttgcgcgcattgaaaaaaacaaaaaaagacgtctcccttcacgatccgatcgggcaggataaggaagggaatgaaataagcctgattgacgttttgaaatcagaaaacgaagacgtgatagatacgatccagctcaatatggagcttgaaaaagtgaaacaatacattgacattttagatgaccgtgagaaagaagtgattgtcgggcggtttggacttgatttgaagaaggaaaaaacgcagcgagagattgccaaagaactcggtatctcacgcagctatgtatcgcggattgaaaaacgggcgctgatgaagatgtttcatgagttttatcgggcagagaaggaaaagcggaagaaggcgaaggggaaataatgcagaagaagccggatctcatactccggctttctctatttcattaaagtttttttaaaaagaaaatagagaaaaaatatataaaagagtgatgaaaatcagttttgtcatcactgataaactcttcgagaaaagcgtctggatcatagcagatggcttctctcttatggggcgttacttccctccatcaagcgattctaagccggacgttctaaaagctctcctgagaaaatccttagatcggtatacttcagtacattcctagtcactgctttctttatagaggcctcatctatgctgtcgatacccttacatatatgactatcacaatgagaggacttttaatgaatatgaagaatcagttaaaaaacattggttagaagcagttcattttaaagaactactcattttatttcttcttcaattaaatcactggcgtttaagtacaattcttcacaatctcttctgttgactccaatccctaagtagtgctcctccagtacggtgacacatatagagggacgagaaaatctcatttaaactgcccatccgatggcgggcagtttaattattacctctcctgttcctttatcaccctctcaatcccatataaaatcagtttcaagccaaactcaaatgctctgtcagtccccatcaactcaaacagcccgttcgtaaacatcctccggaataatcccgcatctgtctcgctcatggaatcaagaaggcgtatcatctcctcccccggatgctcttcttggtccttcaggatagcagtgacattgcgctcatgctgataatcgtctaaaacgaagtagaagacatagtttacaagcgtagtaaccacttgcattttctgctcttgcttaagtggtgttgattccacgcagagtaacattcggttcgtgaatcggatgatgtccggttcatggggcagcgtcatcatcatgagctgcgtagagcaaggatatcggctgagcacgttccgtaccgttatcgcaagccccatcagctgctccttccagtctccctcggagtggaactcctccagaatcattttcgatacttggttagccagacgctggtaaagcttctgtttgctcttgaaataccagtacagagagggagcctgaatccctagcctgttggccaatcgtctcatgctgaatgtttcgatgcctccctccccaagaagttcccacgaggtttctaaaatcttttcctctgaaatctgaggctgctgctttttcatattatccgtccttttatctaacagtgtaagtttctctttacaggtttataaaatgatgataccatctaacactgtaagactcaaactaacagtgttagattaaatataaacaagaaagaagtgaaatataatggatacagaaaacctctattattttgaaaaagcaccgatcgcaaaagctgttgctcacttcgctataccgatgatgctaggtacatcaatgagtgtcatatattccattctaaatgcctttttccttggtacactccacaataccgccatattaaccgcactcgcattaaccttgccgttatttgcaatcattatggcgctaggcaacttgattggcatgggcagcggtacattcatctcccgtttgctcggggagaaaaaatatgatgatgtaaagcatgtatcctcatttgccttttacagcagtttagttcttggtcttattgtgatggcagtgggtctccctttaatcgatccaattgttcatggcctgggggcaacatctgactccttcggcttcacgaaggactatgtcatggttatgcttattggttcacctttcgtcgtattatttttcacgctggagaatatcgtgcgctcagagggttcagcaatcacgtcgatgaccggtatgattctcagtgttgttgtaaatattatgcttgatgcgttagtcatcttcgtatgccattggggtgtaatcggagttgcgtctgctaccgtcatttccaacttggctgcgagttcattctatgccttccacatgggatataagagccagttcttaactgtctccgtaaagtggttcaaggttggcctggatattctgagcaatgtattaaaaatcggcattccggtctttattatgagtatttttttgggggcaatgtctcttatctttaatcattttcttgtcgaatatggggacaaagccgttgctgcatacggaatttcatcccgcttatttcaatttcctgaatttattttgatgggactatgtgaaggggtcgtaccgttaattgcattctcttttacagcggataaattacgcatgaaaaataccattggatttacattaaaagcgattgtgacgctagcagtaatgtttggcgttatcgtctatttaatttccgaccatctaataggtttatttacaaatgacccgcaattaattaaaataggcagctacattctacatgttacgtttttatccatatttattacagggatgtcctcattatttactggtatcttccaagctaccgcgcaaggaacggccgcttttgttatgtcatttatacaaggaattactctgattcctgtattgttcatcgccaatcaggtgaacggctttcatggggtggtttggtcacttgtcattgcagatacagtcgcattccttgtaggtgccatcatgctttatgctttgaggaacaaattgcagcctgaattgaatagttaagtgctagtaaacatatgacatttaaatccgtattgtaaactaatcaaatatgtaaaaaaagatagtttagccctcataatcggctaaactatccccttctcaaatcctcccactttattattaatgtggtttagaagaattgaacctgcacgagttattccgctcactatcattgattatgaagcttatatattaaaaaatggtgagctcaaaacagtaaacgtcgggcttttttactctcttccttttaaatacacgattagaatcatcaaaaacaataatgatatttacacaaattgcgatttacgcaaaagtcaccactcctcttttcatggacagaaaaagaggagcaaacctatgtctgcgtcttaacgtttttctttgcacaacgtctagtatcttctttggatcaatttttctgtaagaaattcaacaagtgttactcaacgacatgaagaaattgtttatgtccttgtcatttcagttattcaactattggtgtaagtgaactaccagcccatacctctcccttattaagggtccagctgtcattataaaaattagacccacctttattaaccgaagggctgtgaacctcatcccaagttagaaagtacacggttttcggatatttttgtttgactgtattaagaaacacagcataatccaaattaccatcttgtttttgtgtgccgatttctgtgaacgcaaatggcttattaagagctgttaactcatcatatccttgaattgtaaaatcatctgagaaatacgcatctaatccaacaatatcaacatatgaagatccaggataaaagtcagtcttaaagtctcgattggcgtccggtgagtaaacccatatcaggttgtccaaacctcttgtatcagtcatataatgatagattttttgataaagttgtttataaagtgagaagcgctggctgtcttttttgttatattcggttagtccccaccaaaaccattctccattcatttcatgaagaggtctgaatagaacaggtacaccttcattttttaactgatcaaggccatctgcaactttgctcagaacagcctctaatcgcttaccctctgtagttgatgagtctaagattttttcatactcactgtttgaaatatgggaagcatttttcccaaaagtactggatgcaggattagctagatgtaagctaatctgtggtattccaccacttttccaatatgagattaagtcactgttgcaactatagtcgatcgtctcagtaatatcagaaatatagggcttctccaaccatccactggaatagtcacaaccataaattgcgggtaactggcctgtagcattcttaattcggttggcttctttcatggaaaacgaagcatttgtgaatccgccgaatgtacctgacagtatgcgattttcagatcggtttggcagatgagccagccaattcatcaactctttcgttgttgcctgtgcattaggattcacagggtaaactgtatgagcaagagccgactgtgaaaaagatgaaaggattatgaaagatagtaatataaaaacagcaatttttttatacataatattctccgtcttctactttttattattttaatcatttattctgttaaagatttataaagcacagaatctattaagtcatttacgctttttcatcccctttcatatttaaaataagagagaccttccttagagatatttgcatttacccattgtaaatctccattttttgggcattaattatattaaaccgaaaaatatcttctttcatcagacgtttcacctattttttactgtatgcctcacagactataaagcaaactttcccttttgcatttaaaccttattacctatttcattaagtcgaattattttcgatattaagtggtgaatgattttcactctcttttttatcctattaaattattttaaaaaataatcaaaaaacaaatcattttgatccctattcatagcagcaaacgttacttttggtacaaagtcctttataaacagaaagaggagcaaacgtatggtttactcctctaacttagtttctttcttcttggtttttcataatctgatgttttccttaacagcagttccaacccgtcactttctccgcagcatataatcaagattctaataccaatccaaaagttattttgatctactgagaattttaatttgcggtgccctattgcctttttctctctctgactcatagttttaaaccattcaataaaaaaccctcaattgatgtttcatattcatttgattttcaaaaacttcagccgtatcaacctgttaatcttacccgctgacttatatcaaaggagctctaaccaaattttaatggctgtcgaacttattaatagcgctaaaatccattgcaggaattttgtatttactttttgcccaactgatgcgccaataggagaagcaattaaactagcaatcataagaaccagggctggtacaaaaagaacctggcccgtaattacttttccaactgttgcgccaatagatgaaagaaatgtaatcgcaagagatgaagcgactgtgattctaacaggaatatttaaaatcgataacataatggggactaggataaaggcgccgccagctcctaaaatacctgatacgccaccaatgataaacgctagggacgaagccaaccatttattaaatatcacttcttcgccttctctatgggcttgtcctcttttaggtataaacattaaaataactgctataatagccagaattccgtatataaagttaattcctttttcagatatataatgagaaaagtaactccccaatacactccctaaaaggatgctgcttcccatgtaaattattaatgctttatttagaagaccactcttacgataagcccaaacaccgccaagtgtcgcaaagaaaacttgaatagcccctatccctgaaacttcatgggcagttaatgacatcactctcactaaagagggaatatacaacagcattggataattaataactgctccgccaataccaatcattccggaaataaaggcaccaataaaccctataatgaaaagagttgtgataaaggcaatatccactttggtttcctcctatcaaaggaaaagggtatctttctattcgataccctttcacattcattagcctttttgaatccaaaatttcaatacatcgccctcgtccgtttgctctaaaaggtcatgtccgcctgatttagaccaggctgcaagatcatttttagctcccttatctgttgcatgcacttctaatatttgacctgattccagttcattcatcgctttttttgtcctgacgattggcattgggcatgccaggccttttgcgtctaatactttatctgatttcatgttcatctctcctcttattaatagaaacttgtgttaccgtattgcacagcggtttgggccaatctccatttcacgctgtttttcttcatctgggctgattttccccatgtttgtttctcgaatctcttggtatgcatttggttgcggaggcaaatgatctgttactaggtgtctaaattctgtttcatccgcaatgttcaaaccatggttctcgctaaataatgtacttagttttttaccaacacttccatcctcatttagctcgtcaatgatcataaagtgtgccggtaatacaattaaatcctttgataacgctttgtaacggctataaagcgtttttcttaaatctcctacccaatcttctgccataccggctaagtctggtctgccgattgaatcaataaacaaaatatcacctgaaagaagatacagatcatcgacaatgaaagaagtggacccaatcgtgtgtcccggagaataaatcggttgaattttaatcgttgtatttccaatgatcatgtcgtttccttcttccaacggctgataatcgaataccacttcttcagcatctttaggcggtaaccagtaggttgcttttgttttttcagcaatgactctgccgcctgaaatatggtccgcgtgaagatgtgtatcaaatacgtgagtaatcgttgcacccttctccttcgcaaaatccataaagaaatctaccatacgtgtcgcatcaataattgctgcttcaccattggaaatgaccatgtatgacaggcagcctttaccgattcgaacaaactgatacatctcaccgccatcttttaaatccccgacttttaccggctctaaatgttcgctccatgctttcattccacccttaagataggatacagaatgacctgcttcagatagcatttcggataccatgacggatgaaccttcttttgcacaaacgaccagcacttctttatcagaaggaattttctccaatatatcttctacgccatctaaaagatcaaaataaggaacattcaaatggtcaaagtcatgcccttctatcttccaatcattaaaatcattttcattacgcacatccaaaataaataaaggttctttgttatagattttttttgtcacttcttttggggtcattgcctttacggtcatgtttcaatacctcctatatcaaatcttttagcggaactaaaacgttaaggatacatcagcatctttaacaaaattctaaaaaggtaacagccccgcctacttcgattccttgtataaattcatcttttgttaaacccataacgtccatcgttatttgacaaccaattcatgcaactcccatttcaatcagttaagaatagaaggcacatttgcgttcctacaaccttctgcgacatgctcttttccttgtcgcaatattacagactttataagcatcaaacagaccgccatttgccgcaataatcgctactcttgtactcatctgttcatcatgctttttatttattcggttttacctgtccactcccgcataccggggacaacattaataacttttttaaaaccttgttttttcatggtgtgggccgccatttcacttcttcttcccgaatggcagataatataaatttcatcatttttgtttaattcattagagcgcttttccacttcaccaagagggatatgcacaactccaggaatatgagctttttcatactcctctatctctcgtacatctaaaatgttaagagactcgtcactatccactttctgtttgaaagcttctaatgaaatatcaggaattgaagatgcattttctgatgaatgctctcctccttttcgaagaaaatgacgaagtatttctccctctgcttcagtacctagatattcatggcctgtactttttgcccatgcttccagatctgctgtggaacctttatctgttgcttgaatttccaatacttcaccagcttttaaatccttcattctcttcttcgtttttacgataggcattggacacgccaaacctttagcgtctagtacaatagttgctttcatcattttttcctccttttttcatataggggtgggggtatataaatatacaaaaagtttctcactagaagttaataccatgtattcatgcccccttttatatttgtgatgtttttaaatccttgtttcttcaatatttttacttgcctttaaacttctcattccgcttagcaatgagtaaatgagtagcattagataaataagttgacactgccttcctcagcatctgccaaataagctgctacaccagcatagtcgatatcatctaatagttctttttcctgtaaaccaagaagatccattgtcatcgtacaagctacgagctttaccccctgttcttgagccatctcaatcaactgaggtaatgtaagtgcattatgctttttcatcacatttttaatcattttagggcccatacctgcaaagttcattttagataaacccatcttatcagcaccacgaggcatcatctttccaaacattttttcaagaaatccttttttcactggaatcagctcttctttacgtaaagcgtttaatccccaaaaagtatggaagatcgtcacttcatgatcgtaggcagctgcaccatttgcaataatataggctgccattgccttatcataatccccgctaaataaaacaattgttgtgcgttttgtttgttctgtcatgtttattcccccaactaattacccctgtgggtatattaaagtcaaaaaaattttttcgaaagatctgcttttattcaactctttaaataccatagggggtataatataacgcatataaaaattcgtcaaccttaggttgatgaatttttatcggctctttaccaataagtcaactgcttcttttactaaattttgtgtgtcttcgcctttttctaaactttcacgaacacaatgttcaaggtttgtgctcacaattaaacccatcgctcgatcgatcgcattacgggaagctgctaattgggtcacaacctctctacaatcttttccttgttccatcatagtcaatacacctttaatttgtccttcaatccgtcgtaagcggtttttaatcttttgatcatactccatatatcaatgaaatcctttctttcatttatttttacatttacatgctgccagttcataactgtttacatggatacctttgcgctttagaaaacgcactcctaaatttaattccacccgatcacgagctattatgtgtattttatcacgtggaatctctaaataaaaacgttttagatacgcatatgggatgtttaaaataatattatccgaaaaattggctacatcgttataatgacgaatatctaatattgtgatgtccatagcctctaatttatctttatggatacaagagattccggttataggataataccgtctatacgatgcaatgataatcacaaaaataagcaggaatgcaataactaaataattgatactacttacaccaccttattaactctttgttattcacaaaactataatatacccccataggtatatagtcaagtgtgaaagttactttctttgagctgatagattcatttcaatatccgcggattgaaaaaatacttacatttcgataatgccaattctgctaaaagtaactcgaataaagaaataagccgattttattttaaatcgactttattttatcaattacttttaaaattagcacaagactgcttggatattacattgggtttcatttgcataaaaacaattcttaggtactggttccccatgtttcatgctggatgtgactccaattactcagaaatctgcgaataactatgctaatcttccgcagccactgcatctgctttggttttatgaactgtaccaaatggatggttaggaggagcataaatggagtaaagttttaatggcgtattacctgtattaatcacgttatgccaagtgccggcaggtacaacaatggcagaatcatcataaacatttctttgaaagttcaaatgatctttgctctttcccattttgacaaccccacgcccctgctcaatccgtaagaactggtcaacgttaggatggatttccaacccaatgtcttctccaataccaagactcatcaaagtaacttgaaaatgctttcctgtccataaagcagtacggaacgtattgttttgttttgtggctctattgatatttacaacaaatggttttggtccataatcctttaaaagaagatttctatcttcatatgaagagcgcaaatcggcacctctgtgtacgttctccatctcatttggaatagtccaataaacagatcttccatcattatacatcggtacagtcacataataataacattgaggcgaaaaagggttatagtacattttttgatccccacaattataaatttttgtgatagtatcctatgcatttattaagggagtgtgctaaatcaagaaaaatcatattaaacacaaaaatgaatgttcgatcaccgtttgattcacggatgaataatttatcaccgaccttgtaatcgttttctggatgttgaatttcactagcctttgttaacaagacatcgaatgacacttttatatcatggattatcaaaggtcgacgatcctaaatggcttttgaacatttacatagcacaacaacagagtatacggaattctgttgtttgtcccccctatcccagctcttttagatttatccctttggatgcgccttgatggccagcttttcagcagcgtagtatttagcgcctcctgaatcgttatagcatatttcaacgccgataaacttgcggttcccagtgccgtttgtaccgtcacctgtatgtgggctcgtttttagtaaaccagtttatattctttttgggcacacaatagaagcaatttttcatatgaaaatttcgtaatcttacacctctttaacttgaaggaggatttttgcatatgtattttcatacccgtcaactaccatctcatccagcatatattcctcatatgcattttcccctatttgcattccattcttttcaatgaactcaatgattctccggtacgcctcttcagtatttccgcctatttcatatccaactgcatacaggccttttggccgtacatgataatttatgttctctcccccattttttacttttatataaaagtaactgtaattgtagaagtctttttctaagatttgttcccgtgcaaagattccgcctatcggatatccttcatctaattcatattgctgaacttcatgaatgagttctgaaatggctgccacatattttcgttccggtaagtttaatgtttttcggcttaacatgaatgtttcttcatttaaatattcaaaagaaattgaggaaaaatcagtctcaagtgcttgttctgtaagcgtcacttttgtttgtaagatcgtttgcaactgcttaagctcatttatttttttatcaatctcaatagacttttcttttagaacatgcaggatcttgtctggtgtttttccttttattagacactttatttcttttaatggaaccccaagctctttaaatagactgatgacttgaaaaatctcaaattgatgataggaataatatctatacccattttctttttttatttccggcgagaaaagaccaatctcatcataatgaaataaggtttgtttttttacacggcagagcttcgaaaactcccctgttgtgaaatacttcttaacatcttcgctcataaaaacctccttgactatacggtaaccatataccttatgatttgattgtacttgaaaaaagcttcaagcgaaaaggataggtaaaaagggttcaattgagtaaaaggggaattcagatgaaaaaatcaataaatgagcaaaaaacgatattcattatactattaagcaacatcttcgtagcatttcttggtatcggtttaatcattccagtaatgccttcttttatgaaaatcatgcatttatccggcagcacaatgggttatcttgttgcggcttttgccatttctcagttaattacttcaccttttgcaggtaggtgggttgaccgtttcgggagaaaaaaaatgattattctcgggttgcttatattcagtttatctgagttgattttcggattagggacccatgtttcaatattttatttctcgaggatattgggtggtgtaagtgcggcttttatcatgcccgcggtaacagcatatgtagctgatattacaaccctaaaggaaaggtcaaaggctatggggtatgtttctgctgcaattagcacaggctttattattgggcctggtgcgggaggatttattgccggctttggcatccgcatgccgtttttcttcgcctccgccatcgcgttaatagcagctgtcacttctgtttttatactaaaagagtcattgtcgatagaagaacgccatcaactctcatctcatacaaaggaatcaaatttcattaaagacttgaagagatccattcatcctgtctatttcattgcatttattatcgtctttgtaatggcttttggtttatcagcttatgaaacggtattcagcttgttttctgatcataaatttggcttcacaccaaaagatattgcagccattattacgattagctccattgttgcggtagttattcaagttttacttttcgggaaattggtcaacaaacttggagagaaaagaatgattcagctgtgcttaataaccggtgcgatcttggctttcgtgtctactgttatgtcaggatttttaactgttttgcttgtaacttgttttatttttctggcgttcgatttgctacgtccggccttaaccgctcatttatccaatatggccggtaaccagcagggtttcgtagcaggcatgaactccacatacaccagcctgggaaatatatttggacctgctctaggcggtatactatttgatcttaacattcattatcctttcctttttgcaggtttcgttatgattgtcggccttggtcttacaatggtttggaaagaaaaaaagaatgatgctgcagctttgaattaattcattttctataaagtcaagtcatttggatgcagggaatgcccctggttaggcacaataagaaaaggtacttaatttgataggctacatgttgcttgacgtgaatatagtttaagctgagttttagcaatatcaggataccgggataagaaaaaaggagaatgtagtatgagtataaaaataaaaggagtaactgatgataatcgtgctgcaattcttgatctacatgtcagccagaatcaattatcatatattgaatctacaaaaatatgtttagaggatgcaaacgaatgtcactattataaacctgtcgggctttactatgaaggagatctagtcggttttgcaatgtatggattgtttcccgagtatgatgaagataataaaaacggacgagtctggcttgaccgattttttattgacgaacgctatcagggaaaaggattagggaagaaaatgcttaaagccctcattcagcaccttgctgagctatataaatgcaaaagaatttatttaagtatatttgaaaataatattcatgctatacgcctttatcaaaggtttggttttcaatttaatggtgaactcgactttaatggtgagaaggtaatggtaaaagagctatagatatccaggcctccttttttgctgagaaacgtttgaacttcgataatgattacctacttaaactgcaagatcattgtttaaaaaagcctggatgaaaatttcatctcaggctttaagcatcttattagtcaaaatctcatgtgttttatccagatgttattcttttttccggacaatttctaaataattaatatgccggccaactgttttgtgcactttaaaaatatacccatcggcttctataacggacccaactgcagcgtctatttgttgagtcataaaccagccgcctattgtatccacttcgtcacttgctaacgtcgttcccaataaatcatttacatcttcaatgagcactttcgaatctaagatatagtgattatcatttacttttctaatattaggcacttcatctttatcaaattcatctctgatttccccgacaatttcttcaagaatatcttcagcagtgactaaacctgaagtgccgccatattcatccacaagaatagcgatatgtgttcgctctttttgcatttttaccaataaatcatgaattggaacggattcaataacatggataacagggttgatatgattttctaacttgaaatcctcttttatcttctggtctgtgtcaatataagctgacaaaaattctttagcattgataaaaccaatgattgaatctttatctccatttaggactgggtaccttgtatagctctctgtcttaatggtcttaacaatagtttcataagaatcctcactagaaatcgctacgatctctcttctcggaatcataatttctttggcgattctttcatcaaattcaaaaatattatttacatatttcaactcattttgattgatttcaccgctcttatagctttcagacagtaagatgcgcagttcttcttcagaatgagcaagttcatgttctgatgcaggtttcaaaccgaagagtcctactataaaccgggctgaaccatttaaaaaccatataaaagggaacaggatgcggtaaaaccaaataattggctttgcagtcaaaagagtgatggtttccgctttttggatagcgagtgttttaggagcaagttctccaactacaacgtgcaaaaaagtcgccatcacaaaagcaatcactaagatcaatacatgtgagactgtttcacttacatgaaaatgagcaaataaggggtgcaaaatcacttcaaaagtcgattctccaacccagccaattcccaacgctgtaaccgtgatccctaattgacaagctgacaaatattcgtccaaatgagtaatgacctttttggctgatacggcacctttttttccctctaatatgagttggtcaatttttgatgacctgatctttactatcgcaaattcagtcgcaacaaaaaatgctgttaagacaattaaaatagtaaagattataaggttaatggttgtcaatgatttgccttacctagtaaggcgtacacctccgatataaatatttatttttataacccgttttttctgaataaacaaaaaacagtatatataacattataagttcaaaagaacctaaaatcaactctgaatgatgtaaataatcatctttttccgtatggagagtggttcccgtagtattcaactagcgattggtgacgttttaaggcttaaaatagaaagcaaaataaaaacacacctgaattttctggtgtgttttaataatatccaaccgtcttgatttatttaatgtctttattaaggttttcttttaaaatttgaatcaattccgcctgttgctttatatttttgcggccatttctattaattgcagcaagttcacagacaattccagctgaaatgaaaaacaataaaccttcaaacattttaaatcccccaccatctaagtgatagtcaaatttgttttttctttttgtaatacctgcttataatcttccttacgctgatatatgttatttaaaatgagtccaataatgacaaacagtgttcctactatatcaaatgcagttatgttatatcctttgatcaccatgattaacaatgtagtaatggggacaaagttaataaataaaatcccattaatggatgataggattttaatgccatagttccaactaaggagggctatgatacctggtaaagtaatcataaataaaaaatcatacttaattgctgcaatcactttaatactcggtaccgacacgtaaccttgcgcggtaagtatagctgtcatgattcctgttatagctgtgccgaataaacatgtcaatgttgaataacgaagtgtggaccactctcggaatatctgtccccccattgtgtagacaacccaccctaaaacaccaatgaatataaagagtagcgagaatagatgatcccccaataaaaaaaagaaacttatattacctttggttatgaccatcgaagcccccaaaaaggcaatcaatatactgatcattgtgtattttttaggtttcacatgtttatatccccatagaataacaattgaaagcattggcatgagtgcctcggcaatggatgctgtcataattccagacttccccatcaacctttgacctaaaaaaataagaacattgtatacagtaaacgccataaccccaaataaaatgatccattttgctttaccctctaaatgaaatgatttttttccttctcttaccaataataaaatcactaacataatcgttaccacaccgtagcgaataaatgaaaaataaaacggatcaataacttctaatgcatgatctgcaactggaaacatcgcgccccaagacatacttgctactaaacatgtaagggcaccaatgaataattgactttttttcattgaattcccctccttttctttaaaattacaatgagaattataaaaagaagtaagcatcaagtaaaatgaacaaaagtgatgaaaaacatcattgataatgatactttaatgaagggggatcttcatggaactgcgagacttacaaattttcaaatgcgtagcccatcacaagagtattaccggtgctgcaaaagagttaaattatgtacaatctaatgtaactgcgcggattaagcaattagagaatgaactcaaaacacctcttttcaatcgtcataaaaaaggggtttcactaagcccagagggccgaaaaatgattgaatacgttaacaaaattttgaaagatgttgaagaactggagcaagtctttctagatactgatataccttctggaatattaaaaatcggtacagtggaaacagtgaggatactgccgaccattatagcttcctattataaaaagtatcctaatgtggatttatcattgcaggctggtctaacagaggaacttattaaaaaggtcatgaatcacgaattagacggagcttttatttcaggccctttgaaacattctatcctggaacagtatgatgtttatactgaaaaacttactcttgtaaccagtaacaaaacgtttaatatagaggatttttcaacgactccgattcttgtttttaatcaggggtgcgggtatcggtctaggcttgaacagtggctcaaagatgaaggtgtgctcccaaacagaatgatggaatttaacatcctggagacaatcttaaatagtgttgcacttggactcggtataacagtggtaccggaatctgctattatgcatcttgctgcacaaggtaaggtttattgtcacccattacctgagaaagacagctgtatctcaacaatctttatacgccataaagatgcgtacctgacaaattcaatgcgcagcctccttaagaccattgttgaacataaaaatatgagtatgtcttaaagtgctttttctctttctatgttaacttcttaaataaaagagaaagcgcatctccacttcgctacccttattcacgcaaaaaatagagcagtaaacatgtgagttactgctctgcttcgtttatccaccgttcatttgttttacaatgtattcagcatcatttcctacaccttgaagcaacgctgaacctcgcttatgctgccaaggcaaccctataaagtacaatccttctacaggtgaaacacctctatgatgtatgattcgaccttctttatccaaaacaccttttatatttatccaacataagggattcctgaaaccagtagcccaaataatattgtttacttctaatgtagatgaatctttaaaaatgatttcattttgctttgcggcaatgactcttttttttaagatgatctccttctgttttattgcatgttttaattcatgcccaaatactggatcacctttcttttgaatgaatttgcctactattgatgtatgacttgcatgtaaaactcctagtttatcaaaccaccaaaagatgcttctttttcctatcattaaagggaaataaacaagtttattactacaagctaaatatgtaactctttctttggataattcaacagctatttgagcaccactattcccaccaccaactactagtacatttccatatgccaattgttttgaattcttatattgtgatgagtgtagttgattaatattatcggataaatcctttgatattgatggaatattaggggtatgaaaaggccctgtagcaatgacaagattcttcgtttgatattcttcccgatttgtttttattaagaaataattctttatttttaggacacttattacttctgtccgtaattggattggaatttcaaattttttaacatacttctttagataagcaacaatttcattttttgaaggaaatccatgtttttctccttcaagatgcattccaggcaaagagctatacattcgagaagtaaataaaactaatgagtcataccgatctttccagctctcccccaccccatgacttttatccaaaataataaacttttgatcggactgctttagataataccctatcgagatccctgcttgaccagccccgattactatagtgtcgtacacattatcaccccgccaatttcaaattgtcagtagacagaatttgcaaaatgctagttgatctcctcactataaagttagataaaaaatttaatggtgatggtggttacgcggcttctccattttaggctgacaaaggatcgcattgtcgtgattatgcgcttcggtttccatttgaatggttacgtgcgtaatgcctttatgctcaagttcatgttcaattttgcgtaaaatattttcactttctgaaatggtcagttgatcgtccacaactgcatggcaagaaagagcattcaatccgcttgtgatagaccatatgtgtaaatcatgaatgttttgaattccctctgtcccttcaattgtacgaatgatatcagagacatcgatattttctggagttccttccattaagatgtgaatggaatctttagtcacattgtaaccgcttcttagaacaagaatagccacaatgatactagccaatggatctgcccagccccatccaaagaagatgataagtatggcagctaaaatggcacctacagagccgagcatatcgcttattacatgtaaataagctcctcttatattcagattattctttgtatctccgccactcatcataatccaagcgaccaatagattcacaactaacccgatgatactaattgtaagcatgccggttgctgctacttttggtggattagagaagcgttcgattgcttcataaatgatataaagagaaataagaattaaggcagcaccgtttatcacagctgcaagaatctcaaatcgtttatagccgaatgtcttattgtgatttgcctttttttcagctaatgtaaaagcaatcagggcaaccattaatgaaattgaatcactcagcatatggcctgcatcagataaaagcgccagactatttgttaaaaatccacctatagcttctattatcatataacctgtaatcatgataaaagagatcaataaaacctttttatttgctccttcattatgattgtgacccataaaaaactcctccttaactaaagtttttaatacatatgtatttattatttcaaatctgttatgaagcattctaacatgatgcaaataatatttatatatgagcatgtgttcatatataaatatatctgctctttactgaaatgtcaaaatattttttatagaaatcaacaatacctccttaattattctcttattaacataaaaaagcggaacaaacacatggtttgctccgctaacctagtttctctatccttttcttgtagtatgcaactacaatttacctgttaaaaattaggcctcaccaagtccaaaactccagtcagcattatcattttcaacaatagatacaattaaatcagttgatgcgataccacactcagattccagtctttcggctaacagcctgtagaatttttgtttcttctcttccggtcgggatttacttgtaacagaaagaacaacaagatttttggttcggttaaatcctaagcctgtatcctcaataatcatatgattttctggatgttcatgcacaatttgataacggtcctgttgaggcacatcaaaagcctctactacaacattgtgagcgacatctaaaagttttttcaaacttgattgatctcgcccttctattaagtcaaaacgaagtaatgacataaaatcccctctttctactgtcagatatttctaatcatctgctacataatgtgctcatttttattcttactacattagaataaaataatttcccaataaccccttcattctgttgttagtcaagcctatgttatgatgtgtatttccataggcaatatacagaatcaacttcgagtaattaaccattttttgaaatagccttatcacttactctagaaatcatttattcttctaagctttagtttacatgaagctctgctatcatatataattcaaaattaagatggaagacatctcaaaatcagatatcaattatggaggactgcatgaatattcagttgttacaggtttttctcactactgctcgtgaaggcagtatttccaaggctgctcagactttaaattatgcacaatcgaatgtaacgaataagatacaacaactagaaaacgatttacagacaaaattattctatcgccatagtcgaggaatcacacttactcccccagggcaaattcttgtttcttactcagagaaaattctacatactattgaagaagctagagcagccatgggcgaatcatccgcgccttctgggccactgcgtataggatcaatggaaacaacagctgcagtttggcttcctcaactccttgcacattataataacctctatccaaatgttgatttgaacctagtaaccggtcctacggaacaacaaatacaagcagttttacattatgagttaaacggcgcttttatttcagggcctattgaacaccctgatttagttcaagaaaaggtattggatgaagagatggttcttgttacaagtgcttcacaccctgtgatttcttccattcaggatgttcaaacacaaacaatgcttgtattccgtaaaggatgctcttacagagcaaagctcaatcatatcctccaagaagaaggtttattacctataaaattaatggaatttggcatacttgaagcgatcattggctgtgtaagcgccggcttggggatttcactgctgcctctttcaatcattgcttcgcatgaaaaagaaggccgcatccgcagccacactatctctgacaaatattctttcgtatcaactatgtttataaggcggaaagacactttaattacccctgctttatctgcttttttaacgcatatgagggatcattttcagataaagaggccagatcaatcgtaaataaatggatggaaggcatgcttcgcctcaaaatacccctgatcagttgtctgatataaaaatataggcgcatctcaatgtttgtatagagcaaaaaagcaaacttcggtatgtagtttgctttttcttcgtgattttgcactcagaatcgtgaaacctagtcgatattaggatgtagattttcctcattcaaagaattttgaacgaaggtcattgccctagacacttggttgcgtcttgaagttaaaggctgactatttcctaaagcgtcaatcgctctcacaactattaaatattcacctacagatttcgggtgacaacgggaagattgatattttcggttggacaggggcagaacatccaattgtaacagttgaagtatccactgatggaggagatcctgcagatctgagtgatattgctgttaattgatcaacttgtttttgttcggaatatactcagtatatagccgcatattcctcctgcaatagctggaatgagccaccccagccctatgttatacatagggagaatctgagagaaaatatgattcacaacttcaatttttattcccgcctccttcaaaccgtcaaataagctgatgatgaatgcgaataataaactgccttgatacacttctgtcttccctttaaatacagaatgcaaaaacgttaaaaatattaaggaaatcgcgataggatacattgtcagtaagacaggcattgacaccttaatgagctgggttaatcctatatttgcgacaagcgtactaaacactgataaaacgacagcaatttttttataagaaatgttcggaaatagttcatgaaaaaatgaagaacacgcagtgatcagtccgacacttgtcgtcagacacgccactgtaatcattaagcccaataagattgaaccataagaaccaaaataataggatgaaaccttagccaaaacctctgctccattttctaaaatccccagttcttcaacgctggaagcccccatataggaaagggctgtatacataactgctaagagtacagctgcaatcgcggctgcttttgcacaaacacccatcagctgttttttggtagaagctccttgttctttcaatgcattcacgatgataattccaaaaacaaatgctacaagggcatccagagtgaggtatccttcctgaaatcctttaaaaaacgcttgtgatgtgtacccttttgatggtgcttgaatggttccaattgggcgaataagagctaccactacaagcaatccgataaatgtcagcttaattggcgtcaaaaatttcccaactatatcaatgatttttgaaggattgagtgataacaagcatgccaatgcgaaaaataatattgtaaataagattaatgagacagggcctgcatcatttgataaaaaaggttttaccccaatttcaaacgatacgtttcctgatcttgggatagcgaaaaaaggcccgattgccaaatagagaatcgtcgtaaatacaatgccaaacaccgggtgaacacggctggctaacgactgtaagttttgtttacccgaaaaaacaaatgctgttatagccagtaacggcaatccaactccggtcactaagaaacctgcattagcgacccatacatttttcccagccatttgaccaagcataggcggaaaaatgaggtttcctgctccaaaaaacaatgcaaatagcattaatcctataatgatgatataggaagcagacactttttttgacattatatatcctccgattaaagtagacacttcttgaatagccaggaaacattacagatgctatttgcactggcgcagtgttgattccaaaataagtttgtgtcagttttatatatttttatcaagttcaacaaaagcatgatcattttgatcgtttccgatatcggttaaaaaaccaattgcaccaaaaccatataaacaacggttccccccgctatggaaagaagcatatttttcttccacaagtgaagcagtacaactgcagctgctccaaccaattcaggaatgccatgactttcagaaagcagactcacatcttttaaacaataaatgaccaaaagcccgattaccgctgatggcagcactttaccaagatattgtacatatttcggtgtcggtttgccagacgggaaaatcatgaatggaaggaaccgtgtcagcattgttccaagcacgaccattgcaatggtgatcatttgctgcgtcatagtcatcgtcatacggaaacctcagctttctccaatggttttctcagaacagtcagtacccctaaaatggcgagcatagcaggaataataaattggtttccgccaaaaaggataagacaggctactgaaagtccaagtcctgagagagcactgtaatgctttttctctttcatccattgttctatgaatatcacaataaacagagcagtcatcacaaaatcaagcccttcggtattaaacttcacgtacgacccaaaaatacctcctatcgctgcccccgcgacccaatataaatgattaagcagtgtcacaaaaaacataaaccagcccttgtcaacattcgccggaacattagcggtataattgatagaaaatgattcatcgcacattccgaaaatcagataaagctttttctttccagtccccctgtacttatccaacatggaaattccataaaacaaatgccgggcattgaccattaatgtcaaaaaaagagcattcatagggttgaacgcaccaagtaaaaaattcgctgcaacaaactccattgagcccgcaaatatcataaaactcatgatgattggatagattgcgctaaatcccaaagaatgcataaagattccataagctatccccaaaaataaaaaccccgcaaaaatcggaattgtatatgggaatgcagaacgaaatgcagcccatatttgacttctcttattcatatgagtgtttatagcaggagagcttaaatgtaacgattctttatttttattcaaatcaacaacctcctacatttcatcaattggcacacttacagttcttttttctgtactcatgactatgcttgtgtcaactccactaatagcagggttctgcattaatgaatcaatgataaaattccgataactctccatgtccttcgccacaatcttaagcatatagtcatggcttcctgtaagtgtgtagcattcttgtacctgtgggaatttgtttatatcctctaaaaatgaatgaattgtctccctatttaagggtgataagttgatgagagctagtgctgtgacttcgattccaagttttttctcatcaacaatagtcgtaaactttttaattatacctgcttctactaggttctttgttcttgcaaggcaagctgatggtgaaagcccaattttcttagataaattcagatttgatattgaagcatcttcctgcaattctcttaagatggccttatcagtttcgtcaagcataatacccatttcataacccccaatacgacttaacagaattacatttcatccgatttaaacaataacgaattttcattcgataatcaaatattttttaaatttaattccttttaaaatattattcacagaataaaattatccccatgattacctcataattaaattaacttacatcagaaagaagtcatgggagagttatgtacttgtgtgacttgataccaacatcataagaaacttatcagaagccaaaaagttattgcggtctcaccgaaaattgaatttgcggtgccctattgcctttttctgcgaacaaaaattgttaaaattcacaaaacagaaagtctactctattattattttaaattcgtcctctagttcctcttgagcctcttgtaaaacttctaatacatcatctgcgtatgaacctaaaaatgtattgctgaactcaaaatttttcaagactaaagtgagcggcaaatccacccaccctgtcaggcaatcccataaagcgtctaaatttctcccatagtagtctgggaagtctagtttatcttttaaaacatcatgtaaaacttctatattttcaaagtctcttccatctatcattatttttctcattagaaactatgccctccattattttatcttaacaaacgttttctttgtaacagctgtttgtccaaatgaggctgaaaacaaataaaaaacaccgatagggggaaactattggtgtttacaagacattttcatgcccggtaggcataaataatgctaaactttgtttttgaaaagctatcatatcaaatttttatgttacagcttttactatcgtttaatctaattgaggagtaaaacgaaatatgtttgaaaatcacatatccccaaaaaattaaaaactaagcggcagttcttcgattgctctcatcagaaaattccctttccatttcatttgttccttttcgccttttaactgtatatttggacagcggcgtaataaggtggaaatcgcaatcttggcttctaagcgggctaactgtgcaccaaggcaaaaatgattgccatggccaaaagcaatatggcggttgttctttctttcaatatcaaatatgtcggcatttggaaatatcttctcatcacggtttgctgatgctaaagaaatgatgatcacatctttccgtttaatctcctgcccatgcagtataaacggttcagccgtccagcgaattgtcgttagctcaactgggctgtgaaaccgcaatgcttcttctatggctgaattcatcaagtctggctgctggcggagcttttcaaattgatcaccgtgacacatcagagcatatgtcatattggtgattaagtttacggttgtttcatgacctgcaacgataagcagcataatcatcgagtacaattcttctgtacttaattgtgtgccttcactttccgcttgaattaatgcactgattaaatctcctgcaggttctctcctttttttgcgaactaaggattccagatattcaacaaactcccctaacaagtggtcattctcctgaagtctttcaggggcatctgaaaaatcaataattacttgcgaccacactctgaatttttgacgatcttccaagggaatgccgagcatttcacttatcacgataatcggcaatggaaacgcataatcgtctactaggttcatgaatttgttgggctgcactttatccaataaagaatctgcgatatgctggattttgtcttccaactgcaaaatcatccgatgcgtaaatgctttttgaacaagagttcgcaagcgattgtgatccgggggatctgaattaagcatatgttttgttaaagactcttcattcttcaatagagcaggacgtttttcttttgcggtaaatacattttcatagtttttctttaatttttcattctttaataaatgtattgcatcatcatatctcgatatgagccagcctttccccagagatcctaaagataatgggtagagaggctgtgattttcgcaattctttataaaattcatacgcttcatctttaaatgctctcgaagacaattgactttccgtcaagatggttacactctttttttcttttgaagacattcattcgacctccatctttatgaaaggttatgttaatctttaaatatataatcagtacgatttgtaaaatgatctattgagatcagtattcatgctaagggccaaaatgccgcccccgcattttgaaataaaaggtatgagacagtcattaatcattttgctgcccaaactctttccctgataagatggcgaaactcctaatacttctaaataccatgccggctcttttaagtatttggaatattttccaacttcattagtcacagtcactgtcaacatgttcaatactgaaaatcctcccattttgattaatgttatcccccctgctgctatataatcgatcaagttaatgtcgggtttatcacgatgttttaatagagcggcaacaaccatttcaccattactgaatgtcaacaaaaaagaaatgctttttaaaatatgctcttgtcagtactttatgcatttcaaaaataaatgaatgatctttttttcgcgttttacgagtaaatccataaaaggatattgattgaaagattcatggagtagctttgccacttagcttattcatctgccctagcttgtcgataaagaaacattgatacatctcctctgagcaagtaaagaaggaaatcgaattaaagcgcccttcctattggaaaggcgcctgccgttttactgtgccaaaatgtttttcatcagtgagtttttataaaatcatttattaattgatcagttgtcaatattgtggcaaattcatcatgcaatgtagctagagatatattatgaatagtcgccgcatcataatatgtatcattttggtctctcattccgaaggctgctgttgcatctgaaatcaggtatgtatcaaaccctaaattaccactcattcttgtggtggttgatacacagtgaggcgtggttaaaccagttatgactacagtgtttatttcatttaattttaagaattcttctaaattcgtaccaataaagctgctatttactgtcttggttataatgacttcttcatccataggcttaactatttcctttatcgcaaacccttcattctttggatggaataaagaatgaggtttatcagaagtgtgttgtatgtatatgactgtccatcctttttctctccataattttagtattttactaatattttcttccgcctttacgttattccgttccccccattttttatcatcgaaggctttttgtacatccacaatgattaaagcttttttcttttcttccacaagataccctcctacgtagaatttctatttattactacattctaaatacaaattttacttttgtacaattgtttaatgatgaatttcgaatgagcgccttctttattgaaaaatgcgttctaaactgcaactgtgcccaagccgttaaccttcaataatctaatctgagaatcactggctctacagagaatgataaaaagcactctaataacgagtgccgaaatgaaaaactattgatttagaagccatttgatacgctcagctgaaaagatgtagtggagtattattagacataaaaagacaataccaactggttttaaatgactaaaataaagcgctgcaacagccagtgcaaagatcaataattcaataactagccttgttaccccgtttacagctattacagtttgtccacttcgactaggatcattaggtactgcaaatacagaccagacaatcataactgcaataggtaaaacccaagttaaaacatatttaaaataaccattaaagcttatccaagcaaacacccctaaggagattagtgcagccatttcaagggtgaatcttaaaagtaaattagtctgattcagtttttccaactcctctataaaaaacacccccgcaggagatgctctttctctgctttatttcagcgtataaaaacttttctgttcttcctatttagattctattgtagttttcggcgagattacctctacttttgaaaagatgataccgactgctgctgttaccaatgctccgataatagaacgatgataagtataatgaaatatgacaacttttcccctcctatccagttaattatccaaataatcaggaagttgtctacaatttgcagaatttgtcgaacgaagtaaagaatataccataaaagctgaatattgacctcgcttatcgctgggaggctttactcattgtatgaattacagtaatacactaccttcccttttgagaagacgttcctctcttatatccatttgttgcaacttagctagactcttccaataggcttccttttggcgcagctgcttctagtcgaaattgagcaacacctgaatgtttcattggaatttctgaaccatagatcgttgctgaatttgttgcaaatgcatacataggagtagtcgaatggtggttgaaaaatgaaatgaattacccacctccagtgatggcagaaaaagcgggggttttgttagagaggaatctatagacatgtgtatctagaagatttgacagcattaaaatttatacttacatcgttgggaacaggccaacaataaagcggaagaacgtagtcatttgaagtggtttggaataaaaatgattcgaatatgttcttatcattgataaacgaacaaaaaaagaacatgttttgaaaaaagattgatcaaaacatcttcttatatgttgtcatagcgtaactttttataaaaaggttgattacattttcggggcttccaaaccaaattttgcccattcttcttttgctggaccataaatacctgaaacagttaaacctgcttgtctcataagaacagtcatttgtccccgatggtggttttgatgttgaattaaaaacatcaaaagtgaaccgttaggcaattgttgtccaataaagttgatacgttcttgaagtgtatggtcagtccattgggtttttaatgcctgtacaaatgcattactggcttgatgatagctgtcagctataaactgagccgaagttggaacaggataatcttcagctggggcatggaacgttaagtctgtgtttgaggtaatgatgcgaatagcagcaacagtgtgccaggcaatacggcctagagtccaattttgtgaagttatttcttgattaagtgattcatcagtcagactatttaatagtttctgtgtagcatctgcttcgaactcccaagatttcaaaaaatggtctaaggtttgaaacacaaaaatcctcctttttattcttttgttttttcaatgtgcctataggttaattataatgcctcgtttcgttaaaaagaacaaaaattttggacaagaataatcatagtaaaatgcgtagaccttcttaaacataacgatttacgcatctttttacaaacatggtgactccttggtctccattgtcagcgagaatcaaatatcatatgaaaacaatcctatattcttattactttactgagcaataaatctcttcggtatacttagtgatgccttcatcgtaatcaggatactgatatgtaagactttctgatacagcttttgaatactttctaaataatgcatagcaagtaaataaagacttccacatttcctgatacccattcacagaatatgtagacatgagttcctcccattctttatttgaaaggtaccgtttcataaatttatagttcttccccatactaaatgaataccctttctgagatgcgatatgccaggccatcattctcaataaattaggacgtacaatttcatttaaatggtcaatggcaaaaaggatttcatttcttgctagtccttttactacgtaagtcgaaaccatccagaactcattacagcaatcatcaaattcccttgcagtcggctttttcatccagtattggcgatcatttggggtcactttatagttgatgaacgaatccttatcgagcaagaccttaaccaaaccatcgttattagcaaaataatcttctgcttcacgaattggaataagggttagatctaatttgttcccatcctcaaaaagaatgatgtatgaaaaccaattacctaattcgggaggaaaaagctccatatcttctggtttttgcatcataatgcgcttcccaaagatttcgagccactgatcattttctttaaaagaatctacatcagttacaaaatacgagatgtcataatcttggaagttgtcaggagggatatttctgtttgtacgtgacccttccaaagtgaccaatcggattctctcatcgttcaaagcaaagtccaaaaaaatgtccatcatttcctgctcacttcgcattacatgttcctccgtttcagccttaatatctaactgtaaaaccgaatattgatctgtacgtcttatagatttttttactcttgaatgtgatgtattcttctaagctttattttacatgatgttctcctatatattattcaatattaagatgcaagacatctcaaaatcagatatcaactatgacggactacatgaatattcagttttttgtagagccgccatgggacgacactatctttgacacactttaatcccccctgctttatcgacatgttaactggtatgagagattgacaaaaagaaggaaaacgatatatttaagcgaatacgagtttttgagtaaattttaaaatgacacttttttcaaaaatcatgtcttaacggggggattcggtatgaatgaatttatgaagaagttttccttaacaaaaccgattattcaagctccaatggctggcggtattacaaagccccgacttgcatctgcagtttcgaatcaaggtgctcttggcagcttagcatcggggtatcttacgccagacctgctagaacaacagataaaagaaatgtttgagctgacagacgctccttttcaaattaatgtgtttgttccgcttggtctagaaatgccaccaaaagatcagattaaaaagtggaaagaaaacataccgttagctaatcaagtaaatcaattcacatctgtacaagaagagtgggatgacttctatcaaaaaattgatctaattttaaaatacaaggttaaggcttgctcattcacttttgatctgccgcctgaagacgcagtaaaggagctaaaaaccgctggatgctgtttaataggaaccgcttcaacagtagaagaagcattgttaatggaagaacggggaatggatatagtagtccttcaaggaagtgaagccggtggacatcgcggagcatttttaccttccaaaggtgaatctgccgtaggtttaatggctctgattccacaagcagcagatgcactgagcgtacctgtcatagctgctgggggaataatagaccacagaggagtaaaagcagctttaaccctcggagcccaaggcgttcaaatcggttctgcctttttaatttgtcacgagagtaacgcacatccagtgcataaacagaaaatactagaagcaaacgaagcagatacaaagcttacgacattattttcaggtaaagaggccagaggaatcgtaaataaatggatggaagaaaaagaacagtttgagacacaaacccttccgtacccttatcaaaatacactaacgaaggcaatgagacagaaggcttcacttcaaaataaccatgatcagatgtctttatgggcaggtcaagggatacggtcattgactgaggaaatttcggttaagcagcttttaaatcagctttgccaagaggatataaaaatataggcgcacctcattgatagagcaaaaagcaaacttcgacaggcagtttgcttttttttcgtaatttcatcccctgactttggaaatttaaatactcctacattttcaaagctaattgaatcgggttatcaatcatcccactgatacggtgcgatcttgatgatttcaccacaatacatcaccaacatttcgatcttatctccccttctccagttttgctccctattcgaaaaatcgatagctcccatattaaattcgaatagtaaaatggttctttttcgtttgattcagatgatataaagtcatatgataaaaaaagaatgagacagaaagcgtgagaagtgatgaaaataggattttttgattcaggaattggtggcatgactgtattgtatgaggccataaaagttcttccttatgaagattacattttttatgcagatacgttaaacgttccatacggtgaaaaatcaaagattaaagttaaagaatatattttcaatgcagctgaatttctggccagtcaaaatatcaaagctctggttattgcgtgtaatacagctactagcattgcgatagaggatcttcggagaaacttcgactttccgataatcggaatcgaacccgctgtaaagcctgctataaataaatgtacagaggaaagaaaaagagttctggtagttgctactaatttgacgcttaaagaagagaaatttcataatctagttaaagaaattgatcaccatgaccttgttgattgcttagctcttccaggactagttgaatttgctgagaactttgattttagtgaagacaaaatcattaaatatctaaagaacgaactatcttcttttgatctgaaacaatatggaacgattgtgttaggatgcactcattttccgtttttcaaaaacagttttgaaaaactgtttgggataaaagttgatatgatttcaggcagtgtcggtactgcaaaacagttgaaaaaagttcttgcagatcgtaatcagcttggtaaaggctcgggctcaatcacctttttcaattctggccataaaattgtagaccaagaagtcatatcaaagtacaaaagattgtttgaaatattagatgaaaatcaaaggagtcatgttggacattgaatgtaaggggctctggttataaacaatttttcagtaaattcacaaaagagagaagtatgaattcgggtttgttatccaatgtaaatgaaaaagacagtctcatgaagaaaaacatgaactaagaagcgggcttaaaaagcccactttttttctaacaaacaattgagttatgcacaaatatctgattacagtgttttcgctctttcccctcttatttctaccccatctctatagcttttctatttcaataaaacacaagtctcgattgaaaagttatcgtaacatttacacttcacaggacatttttcgagattagaaatcgaccgtttgccagatacacaaagtcataatgtgtaaattctgtgtctatttgcatgtttattatggaattattttcataatgttttataatacaagatgatagcgttttctaattataatgatagggggaaataatgatgatgaaaaaaggactgctcgcgggtgcgcttacggcaactgtgctttttggcacatgtgcagtagatgtgccgggtattattagtccaaaaaccgcagaagctgcatcacagctaactgatggaatcggcggaagggcttacttgaacagcactggtgccatttttgttacgaaaatccagcttcctagctccattcaggtttcaaatgggacagcctacatctactctggctttagcgggggcacagaatccgatatcgggcttcagtacagtgataaatataatgtatggaaaccatatatgaaagtcggttcaaaaggacaggatcaggttcagtacctcgaaggaggaagccaattcacgaatacgaaaggcttccgtcccggcagcaccgtacaacttaccatctacaaaaaccttaacggcaatacacgcgctacatactggggcacaaacaatgcgggatacaacggccgtctcatttcagagatcagcaaaacaaatgtcggctccatctccaaatggaaagcgctcgctacagttgcaacaacaggttcacgccaatctatcaaatcaaacttttcaacatcttttacaaacatcaccatcgacaacaaagcaataacacctgtaattgatacacaagacttcgctaaagtaacagtctcaggcaacagtgtcagtttatccgttgtgaaaaattaaaacatgttaaacatacaatgcgttaggctattgagaagctctcgatagtcttaaagggggcttaacatgccccttttttcatttcaatttaactttcagttagcttcggtgcatgccgtctatccccgtcttttatctgggtgaagtaaggagcagctcgccccttctgagcctgttccatttgctcaacgcaaaaggtgtgcattactgtcttaaaaatgttaaaacaaatggcagatggtgcactttatttttagatgaggcatgcttacgctcgatatgcaagtcaaatgattaagggtctgcaagagagagaagttttgggtgtactttcataaaagagggatgtcttcatatagctcgattgcaccaggaacattaaccagcgattggccgagaacaacacatcactttgaaacggattcattccaaaataataagtatgatcaataactaataaagatcagttagcagtccagccttaaaaatatttttacatcaagtaaactagcatcactatcgaataagctcgatctgcatatcatgtactatcctcttttaaggaaggtgatgttatgaggtcatttccattaattgtagttctattcatcctattaatcatcgttgggacatctttctttggtggctattaagaacacaccttacctcatatccatcagacgccataagaaatctttatggtgtctgttttttattagatttaaacaaaaccattaaagtggggccatgcaaacacacctatggagattactgccacgacttctttgtgagggaaatattcttccctttatggactattgtcgatcaaaagagaaagttgaaatacctttttatggtgagatgaatcgaggcttagacatataaaaaaccgcaaagctttcttgaagaagctttgcggtctttgggtctcttctttgcttcatataagccaatagatttcaagcgtaatccactgccatacatccaatgattttttattttgaaataggtttcttctactcttcctgtgagatgactcaaggtatgccacgtcacaataatgtggcggatcctgagtggtctcaatcagttttttccccattctatcaattctccacagaaaaaatggctatggcagaacaactttcatagagtaatcatcatttaatgagccatcatctcatgggcaatatcgtgtccatccatttttgacgggtagtaggtaggccaatttttgacttcatcaagtaaagcttcacggtcgtccccccaatagagatgataatgactagctttagtcgggtaaatactatgatcactaaactgaatatactgaggcagctcttctgcttttttagctagtttgaatatgtatcttacccctctattgcccgcatcataggtgagaatttcgtacccgtcatacgtatacttaccagaatattcttttccatttttgaagaacgttacagtatctttctggattacaatacggtcaacatctgtttgatagccttttttataatactctttatattcttcagctgtcttgccgccttcgtgttctgatttatatgaaaacacttcgtcaagagtaccatcttgcaggtatggatatacagattgccaatctccttcccaatcagaaagtaagcgatcctttacttggctgtttttaaaatagccttcatatattttttctgtttcttcatcatgcgcatgactatgatcgtgagaatgttcttgtgtatgactgtcagatgtttgctcttgcgttttggaagagtcttcttcaactgctgaggatgatgttgtttgattagactcacctgcagaagaaccggaagtctgacatcctgccaatacgagtaatgaaccaatcgttaatatgcctagccgctttgaaaataaaatgttcattccaacactcctttttattaaatcgaaaacattacgatttatattatacatacatctcttgcaaacatcaaagggaaaatgctcttcatgcggatggactattttaaaggaataactgactttgttcatcagttattcctttaaaatacgaaagtctacgatatttccatatcgatccgcttcaatattacagcacccctcaagcagctgttttaattttccccgtccgcgttgtacccttgattttgctcctgagtaagaaatgccgagcttttcactcaactctttctgtgataacccctgaaattcagttaactcgagcgcctctcgatacttttcaggcaaccgtttgatggtcgatcgaatacacacagttgcttccttggtgaaattttcttcctctgcacggttattaaaatgtagatcatcaggcaatatttcgcttgttttttttgtacggtaaaaatcaataatcgtatttctagtgatccgataaatccagctgtcgatcttttgttcatcgatcagatttgggagatgcacttgtattttcataaatacgatttgcaagaggtcatcaacgatagattgatcgttaaccctttgtgaaatatatgtttttaacggctgatgaaattgatcccatagatcctctatattcatttgaaaaaacctcctataattttgcgtctgctttacatttgcttcgtctttttaatcgtaacaaagagcgaaacaattgttgaatcaattgtattgcagctgttgcaaaaaataatgataaaggagaggtttgttgtggagtatacctatttagggagaacaggattgcgggtgagccgtttatgtttaggcacgatgaattttggagttgatacagacgaaaagactgcgttccgtatcatggatgaagcgcttgataacggcatccaattttttgatactgccaatatttacggctggggcaaaaacgcaggattgacagagagcatcattggaaaatggtttgcacaaggaggacagcgccgcgagaaagttgttctggcgacaaaagtatatgaaccgatttctgatccgaatgacgggccaaatgatatgaggggcttgtctctatacaaaatcagacgtcacctggaaggatcactgaagcggcttcagacagatcatatcgaattgtaccaaatgcatcatatcgataggcggacaccgtgggatgagatatgggaagcttttgagactcaggttcgctccggcaaagtagactatattggatccagtaattttgcaggctggcatttagttaaagcgcaagctgaagctgaaaaacggcgattcatgggactcgtcactgaacagcataagtatagtttattagaacgaacagctgagatggaagtgctgccggctgcacgggatcttggtttaggagtagtggcgtggagtccccttgcaggagggcttcttggcgggaaggcattgaaaagcaatgccggaactcgtacagcaaaaagagcagatttaattgaaaaacatcgtttgcaactcgagaaattttcagatttatgcaaagaactaggagaaaaagaagcaaatgtggctttggcatgggtgctggcaaatccagttttaactgcgccgatcatcggaccccgaacggttgagcagctgcgtgatacgataaaagccgttgaaatcagtctggataaggagattctccgcatgttaaatgatatctttcccggacctggaggagagacacctgaggcatacgcctggtgatacattcattactcaatactgacatttttcttaaatatttatactgaactatcatattaggaaagacaagagcttgtttgtctcttgtcttttccacatcatgttgaaaatgctggctaaacatcgacaaaaatgctgccgcttctaaaaaagaaccctaaacaatagagtaactggaaagacaactggcttgatcagcttgggacccctttcagctgtatttaaatcaatcaaactaatgattcattggcagtctaaatattattattgtttgtttacaaaatagtaatagcccctgtaatgattgctaacaacgtaataactaatgatgtaattacagcccacttaacggcaaacctttgaaatgaccccaagtccattttaagcatacttactaacagtagtgttgacgcaactaatggactcatcagatgaaccggctgccccattatagaagccctcgcaatttctactggttctataccatatgctgaggcagcttctgcaaagataggtaccataccaaagtaatatgcatcatttgataaaacaaaagtaaacggaatactagtgagtgctacaataacggggaaaaaccctcccattgatgagggaataacggatattaatgatcctgctatggcatccaccatctttgtcccggataatataccagcaaatactcctgctgaaaataccaataatactacagttatggcattaccagaatgctcggcgattcgctccttctgcatttttacattcggataatttatagtaagggcaagaacaaaaccaattaaaaataaaactgacggatgcttagttccaagcacaataaacaccatgatacttataacgaggaataaattaagatatattaagcgtggccttttcaattgctcgctctccaaactagcagccatataagattgagagctgtcctttgttatatgtctaggctctaattgaacgatgcctattcgattcctctctttccttcccattagaaaagccagaaatatcacacaagcaatacctccaagcatggtcggaagtaatggcacaaaaaaatctgaaggatccaaacccagcactgaaatcgctcttgtagctggtccgccccatggagtcattccgctaacgatactcaacgacagcattgctaatgtcgccataaccatgggattcataccaattcttttatacaaaggtaacattgctgagactgttatcatataggttgttgtaccgtccccatctaaagcgataagcattgccaagacggcagaccctatcgctattttcacagggtctccctttactatagataaaattttttctattagcggatcaaataaacctgcatcaattaaaattccgaaaaaaagaatagcaaacaatagcaatgccgctgaacttgcaactgtttgaattccttctaaaatcatgtcgccaatacccttaccaaaacctccaataagagcaaaaacaatgggagtgatggtcaaggcaacaataggcgagactttctttgtcattattaatattgtaaaaacagttaccatcgaaaaacctaaaatagtaagcatattacacctccaagaatgcgctttcaaatgacttttgattaacatatcttatacggtgtaataagttaaataaatatttttttactgtgtttcaaaaaaaattctatcataactttaaatggttaccatttgttcaccctttaaaaaatcaatgaatgctttaacgagtttgattcctaatgatttttgatcgtacattagccaagtatctctcattagaggcttacccttagcattatacagttccattgtgtacaaatgatcagattcctgcaggcaaatttctggtgctatggagtaaccaagaccatgctttaccatctctttgcaagtctcttgtcgatccacttccattgcaataatgggggcttgttttagattcgtatgcatccaatcttctataatcgtttttaaagaagcatccgttttatatttgataaaaggtaaaaaaggaagctgctctatcgttattggtttttttgagatgatatgtaatttttcccgtgtcagccgttcctccacccctttccagcgatggcttcctctcagtataccgacttgtacaataccagcatctaataatttcatgacatctgtgctccagcctgtttgtacactatattggacattaggatacatagtggaaaattcccttaataacttagggagcttatattgagcgaaattgcttgatacccccagccttagatgtccttgcacctctttgcttagattagagatatgatctttggtatcttgaagttcctgtagcattcttcttgcataagcaaccaagtgttctccttccgcagtaaaggtaattcctttatgccttttggtgaataattcaattccgaaaatctcctcaatcttattcaaccgataagtgatggaaggctgtgatgtaaataatcgttctgctgtttttgttacactttgttcttcgtgaagaattttcaataaaatccaatctttctcatccattttcatcttcctttctagtccttctttcacaattataaaagtttttttatcgaatattaagaaaacttatattttatttttatttttttaccttctacactaaaaaacataaaaaatactacctttaagatgaggatgatgacgatggtcaagacgaatgtaacaatcatgagaggcggaacaagcaaaggcgtttttttccacgaatcagccatgcctaacaataaaaacgaatgggagccctttttgcttgatgtcatgggaagtcctgataaaagacaaatagatggtttgggtggcggtaattcccttactagtaaagtggcaataataaagaaagcatatacttcggatattgatgttcactatactttcggtcaagtcagcatttcggaagaaaaggtggactttaaggggaactgcggaaatatctccgctgctgttggtccatttgctatcgaagaaggacttgtaaaagcgacagaaccaatgactgcggtaaggatcctgaataccaatacgaataaaatgatcattgcggaagtggaagtggaagacggtcaggtcaaatatgacggagatgttacgatatctggagtgcctggatctggatctccaatctatttaaactttcatgatgccgctggttcagttaccggtcatttattgcctactggaaatagttcggagtttttagatacaagtcaaggccaaatagaggtgtctattatcgactatgcaaatccattagtttttgtggaagccagcagtatcggcctggagggaacggaacttgcagaagaatttactgatttacagttggctcaatttgaagaattaagatccattgcggcagagaaatgcggctttgccagtcgattttcagctacaaagttatcgccggctgtccccaaactggctatagtagcaaaaccagagaaatataaagatagtacaggtgcttggcattcaagcgttgagatggacttacacatcaggatgatgtccatgcaaaagccacatcaagcactggctgtcactggagcgatatgtacaacaagagccctttcagtggaaggtgcaatccctgcaagaatagcaaaaaaccactctacaaaggttcggctagctcattcttctggtattattgaaacaatggtggagcccactggtataaagatcgtccgtaccgcacgacgtattatggacggaacagtttatacgcatggagactatcaaatgatgtagatggactgtgcaaaaagcctccccctttccatcgttaatagatggattgaatgcgccttcttgcacagatccattgtaatcttgcatggctttaaaaaagcctctatattgtattttatgaaatcgccaaggtcctttcatgtatctgcctcaagcatgacataatcattatagagaaaattgaatactttttactgcaaataaaaagataccaacatcattggtatcttttagattgagttcatctgcagcggtttcttttcctcactgcttatttgattacaaaattaccgtactcgtttgaacgaacatgaatcggtccgtttagattatagttgttctccttggcgatagagcgaagcacgtccacacgggcaactgattctctccattcgtcacgggtgtcatgattggccggattcatcagatcgtcatagcgtacgtccaagaatttattcaaccacttcttctcgtctattccgtctttaggtgatccgcccgcttttttgttcgtacgtttaatcaaggcataaaaagagtcagggtcatcaccatcgccatgctgaataaccgtatcgtacatcacagctctagccaatgctgtttttagtccggcattatccgatcgtttcatggcaggctgataatacaaatggtcatttactttgtcttgagcggcgcgaaattccttatcatttgcaagcgacttccaggcagaagcgaatcccttgagattgcttgtatcatcgctttcttccttggccagacggcgcaattcagtcagatactttttcagtttgttattcggaactgcctttgtgtatacttctactacttccaatgcatccccggtagccgttgtaaagcccgcccgtccgcatgtatagcctcgcccgtcatccaatcgctctacatatccatattggatctccgttgtgccgttttcaaagatacttgtcagctgttccgcccggcgcttttgatctttattcagtcccgccgcaaaaaccgtttcgctcatcatcagggtaaaaaacatggtgaaaacaagtaatgagatcgctgcttttttccaaaaatctgctttttgcatactgattttcattttacttcccctttctaaatattgtaaatacagactcagtatacatgatgaaactgccctattgttgaaaatacatcaatttgtaaatattttgaatctaaagtaatatagcttgaatcttactcttttcattgccaatcagccttagcccctctcactgggaaggtccctttcatactgcttcaactttcattaacaagatgccataggctttactctattttataatggaagtgatcatcgaaaatcgttagggaggtgatgtaaatggcaagcaagatgagaatgccagattccgcaacgtcccatgcaaagcctactattgggaaggcgatactttgcatggggtagactttctaaaagatcgcccaagtaagcttttctgatatagtggctttgcaccttatttgacataaaaaaataaggagctggcagaaatggcatatgtaaaagcaaccgctattttacctgaaaagctgatatcggaaattcaaaagtatgttcaaggaaaaacaatatatatccctaaacctgaatcctctcatcaaaaatggggtgcgtgttcaggaacaagaaagctgatcgatgacagaaacgcttctattaaaaaagcatttaaaaacggcaaaaccattcatcaattatctgatgaatatcacctctctattgaaacaataaaaaaaattgtctactctaaataaacaaaacggaagcactgataaaaaataatcagtgctttttatatggcgagtttgtttcttagttatttcctgcatatgataccattggccaattgtgtaaagttaagggagatgagaagaaaggaaggtcctacaaatgacgataaacaatggaacgttgcaagtacccggcgcgaacatccactatcaggtgcgtggctcaggtccaatcattcttttggtccacggcggaggcggtgatgccgacaagttccatcatgttgccaatcatctggctaactggtactcggttgttacttacgatcgccgcggccattcccgcagcaatctcgccaatcagattgaggattaccgtgtggaaacacacagtgacgatgctcaccgtcttctagccaaaatcaccaataagccggcctatgtatttggaagcagctccggggctgttatcgggcttgatctgtgcatacgccatcccgaacaagtacatgtcatgatcccacacgaaccaatcttattgcagcttctgcatggaaatgagctgaaacaagccgagcaattcatggaagaccttaagaaaaatcatcaaagtgaagtcattaagttcatgtcaagattagagacagacgaacaatcaaaggctgtgctgacaaagcggcttctcggcaattcaacgtatttcactgagtatgaaattcaaggaattctcagctatacattagatttcgaagcattaaaaactgtgtttacatcttcaccgatgaagatactcccagctggcggaagtgcttctcgggagctttttccttatcgttgcgcgaacgccctagcggaacaattggaaacagaatttgttgaattccccggaaatcatacggggtacacaatgtaccataaagaattttctgagaggttacacgacatgttagaaaaagaaaataaacatacgtgttcaaaataggacaggtaaaactaactatggaattggagaagatttcacgaagcgtaaaaagaacttttcactaacgagaacgcaatgtgagatgtttaaccaaagtgatattagggatttcatcgaaaaataggtttgtacattacgttctcctattgattatttcctatcttaattccgtattttataccattagatacaactctaaagcggctcgttattttgtcctcaacaacaaccagtgtctaacatcatgaatctcttttgaaaatcaccacaaatgcaggtatggaagacttcatcgcagcaaaaaccataccaactattgttgttggtatggttcgtcctagataggcccttaagaagagattctattgtacggagtatttagctaattgcatttgtaaccgacagggccgtctgaacctgtgtacacatatgtgtcagacacatatccaatattcacgacaccccgggaatctttccactggatttggtcccagatattactcgttccatacttccctgtaacagtcgttccataagcgtaacaataataaggaacacgggagccactcggaatggaaagcataataggataatttgtaccaggaccgctgcgcatattgacaggcgcaccgctgcttgttgagacagtaaagtactgcacggcaagtgcctgactggaaaaaatgaataaagatgcaatcatcacggttaacatactcagcattttcagtttagtcaatgtcatccctctttcttcaattccttcattttaagaaacgatagaacaatgctaccagctgcatttaggaacaaccggaccgtctgagcctgtatacatatatgtatcagagacaaatccaggaacgatctccccgctggcaagcgtccgctctgtgtaattccaaatgttactcgttccatactttccagttacagttgtaccggttttgtagcaatagatcgggatgcgggttccgctcggaatagtcgttacaattccccaacttgtacctgggccgctgcgcatattgacaggagcaccgctgcttgttgaaaccgtataatactgagctgcaagtgcatggctagaaaaaatgaacacagatgcaatcatcaccgttagcatacttagcctctttagcttattcaccttataccctccccttataaatgccgtacgtttgactttcttacatccagttaaggatttactttcagataccatgccccctcccctctcatatatttatcaatgtaccataaactagatctttcaaaagtggaattattcctatgttttcgacaattaaggatacaaaataaatggtagtcaggcttgatattgatggtgtgttacatttggcatttgtccagtcggtaatcacgattgacaatcaggaaaaaggacatggatcaagcggtttcgtgtccaccaattaactcaatcagtgtacttctgccttgtatccacgcttcttctcgattcatagatactccacctttttcaccaatcaaaaacggacaccaaacaaatcagcgtaaatgctgcaagttcagtgtccgcaacctattatgactttgctttcttttaccagggcgtataaaaatgattaggtacgttatcaaacgttatattctatgattttgcgagtcgaaaaatcataacattttatatatttcaatcagattatgatctggatctctgaagtgagcaactcgggcactccattccttgcgatcatgcggtttatttacacatttaactcctttttcgtgtaaatcgtcatatgttttatcaacatcttctaccttaaactgaagcaaaaattttgattgagcttctccttccaacgattttttttcctctccaacgatttcagccatcgtttcacgagataaaagctctattttcgtttccccattatcaaagagtgcatattccatttcattctctaaccaacttattggaagtcctaatgaatctttgtaaaactccacgcttttcttaaaatcattcaccaacagtctaatttgtaacagcttcatatcgagtgcctcctataaaaccatactttttactggtcatccaatttaatgatacaaaaggaaacctgacagcactatgtcaagtttccataaataaatttcctacttcacctttatttcagatttaagtgcagtttattccatgtcataagaaatgtacgctaacgagcaaaaacagcgattcttaaaacaaaaaatgataccgagtgtattttctgtatgcttcaacttcatttcgggaaatgtaacgttgataaaggaggttacatcaatatggatcatcaaacattggcagctcacgaggctgttgacttacatgaaatcgtgaactttaaaacactttgtatagcgaaatcaaagttaatgcaaggacttgtgtttgaccaagaactgaaggacttgatgcaaaaagatgtacagcaatccattcaagaccttactgaattacaagcggtttatgagcgtgcctcatttcaggcccctgtccctcaaagccgcccaacgccaatcatcaattgaaaggaaggtaagcctctttgaataatgatcatttagaccccattaattcgctgaatgtgcctgaactagcagacactacattcgcgatggattttcttatacgagctaaggaaggcgtaaggaatactgctgtagctttgacagaaaccgcttcaccagatgtaagagccttgctgcggaaacagctgatgcaaggaattgcaatgcaccaagagattacggaactgatgatcagcaaaaaatggttccatccatatgagctgagcgaacagtataagctggatcagctctctgcaaaaaacacgatcatggtcggcaatatgaacctcttccctgatgaaacaaatcgtaaagggatgtttgaccggacacctgatgaacactaacactggaggttttacagcatgaaggcagtaacgtatcaaggcattaaaaatgttgttgtcaaagatgtccccgatccaaagattgaaaaatccgatgacatgattatcaaagtcaccagtacagccatttgcggatcagatttacatttaatccatggattcattccgaatatgcaagaagactatgtcatcggccatgaaccgatgggaatcgtcgaagaagttggttctggggtgactaaactaaaaaagggagatcgggtaattattccctttaatatagcatgcggggaatgctttttttgtaaaaaccagctggaaagccaatgtgatcagtctaatgacaatggggaaatgggtgcttatttcggctattcagggcaaactggcggttatccaggcgggcaagctgaatatttaagagtgccgtttgcgaattttacccattttaaaatccctgaatcttgtgaggaacccgatgagaaattaagcgtgattgccgatgccatgaccaccggcttttggagtgtggacaatgccggcgtaaaaaaaggcgatacagttatcgttctcggctgcggaccagtcggcctgtttgctcaaaagttttgttggctaaaaggcgcaaaacgcgtcatagcagtagactatgtaaactatcgcttacagcatgcgaaacgtacaaacaaagtagaaatcgttaattttgaagaccatgagaatacagggaattatttaaaggaaatcacgaaaggcggagcggatgtagtcattgacgctgttgggatggatggtaaaatgagcgatctcgagttccttgccagcggcttaaagcttcatggcggaacgatgagtgcattggtcattgcttcccaagctgttcgcaaaggaggaaccatacaaattacaggtgtgtatggaggcagatataacggttttccgttaggagatattatgcagcgaaacgtcaatatacgctctggacaggctcctgtgatccactatatgccgtacatgtttgaactagtatcgacaggcaaaattgatccgggagatgttgtcagccatgtcctgccgcttagtgaagccaagcatggctatgacatttttgattcaaaaatggatgattgtatcaaagttgtgttaaagccttaaaaaacggaggttacagaaatggaatacgccttacacgaagtgcttgaggttcaggaaatgactgcatttaagacactttgtttgacgaaatctaaaacaatgaaagcactggtatctgatccgaagctgaaagaaatcatgcagcaagatgttgatatcaccacacgccagctgcaggaatttgcctctattttatctaatgcaaagcacgaatgaggagatgaataaatcatgaatcctatcatagaatatctgactggcatgaatgttctaacagaccaaatcattgctatggacttattaatttcagcaaagaacggagtcagaaattatgcgatggcagccactgaagccggaacgcctgaagtaaaagaggtccttatccgccatttggaagaagcactcgatatgcacgaacaactctcaagctatatgatggaaaaaggctggtaccatccttggaaccctgacgaacaagtcaagctgaatttaaaaaatattgatacagccattcaattgccaaccctttaacatacaatgactgatttgctgaggaacagtattgattggccacaactgttcctcagcttcaaaatgagcactgtttgttcgggtcctatgaccgtaaatagattaaccgcttttctccatctgatctccgataatgtttgcaaattctccaatccaaataaggaatcgtaaccacctctttttatgcgatctcttgatggagaaaacaggccagaaacaaaatccttcgtttttgacctgccctcttcacacgcaaagaatgctaccttctttgctccactgatccgtgaagactttccgttttaggcctgcttttgagctttgcctcattttcacgcaatttcccatcataatctttaatttttgtgtctaatctcttaattgtttcatcaatttctttccgcttctctatcagccgctgtcgttcgtcagccaggatattttttcgagcttctaccgtacagtcaccttcggtaaataatgttgtatattcaattagcgcttctatcgatagtcccgcatttcgcatgcatttaatgaattcaatccatttgatatcttcttcatcatagtcgcgaatgccgctgtcttttcgttttacaggcgggattaatcctacacgttcgtaatatctgagtgttgcggctgtcaggccaaactgctttgccacctgagcaatattcatgatcttcacctctctatcctgcatgttgtgaaggtaacacttaaagttaactttaagtcaagctcaagacaagtggttagctgctgaatctgggtttatatattcgggacttgccttaaagcacactttaagctctatacttctccatgcaataaaaacagtgtagatggagggattgctgaatggcaaataaacaaactgccggaagagaacaaaccaaagtttgcttaacttcatgatgatgttctattcggtgacatttgggaaagagaggaagaacttccccccgagatcgcagcataattacagtttctacgttaattgctgactgtatctcaacttataaatcaggttcattttaaatgttattttaaaaaaacccttgccttaaagcagactttaaggtttatcgttatgttgaagacaccataaaacataaataagtgcatgtttttttacaacacttatgatgaagaaagggaaggttcatatgtgtaatcaacatcaaacccgtgtattaagcgtgtcacatgcaaaagccaaatttgaacaaacgacgattgagcgaagaggattacggccgcacgatgtcttaatcgatattaaattcagcggtatttgccattcagacattcatagtgcttttgatgaatggggcggtggcatcttcccaatggtgcctggacatgaaatagccggtgtcgtaacagccgttggagcagaagtcaccaagtttgctgtcggagaccgcgttggtgtcggctgttttgttgactcttgcggagaatgcgaatactgtctcaacggagaggaacaattctgcacgaagggtgttgttcaaacgtataactcagtagactacgacggaaaccccacttatggcgggtacagccaaaaaatcgttgtcactgacagatttgttgttcgcataccagatcgtttggaaatggatgttgccagtccgctgttgtgtgcaggtatcaccacgtattccccgctgaaacactggaatgttggccctggtaaaaaagttgcgattgtaggcgtgggtggccttggacatttggcgattcaatttgcacatgcgatgggtgcagaagtaaccgttctgagccgttccatgaataagaaagaggaagctctggaactcggtgcaaatcattactttgcaacaagtgacccagctacattcactgcattggccgggcgttttgacgtgatcttaaatacggtatcggcaaatctcgatgtagatgcctatttatcaatgcttcgtatagacgggacacttgtaaacgttggagctcctgccaagccggacacatacagtgtgttttccctaatcatggggcgccgcagcattgcaggttctctagtcggcggaattcaagaaactcaagagatgctggatttcgcagctgagcatggcatcgaacctaaaatcgaagtcatcggagctgaccaagtggacgaagcatacgaacgtatcctccgaagcgatgtccgttatcgatttgtgattgatatttccacattgtaataggttattccttatatggggctgacccgcttttattgaaactcacgaaaaacgatctcgttaagcaaatattttgaaggccggtcaatcttcctgttattctatgaatagagagttattaggagggttttttatgagcaaaaaaatcgcagttcttgttacagaccaattcgaagacatcgaatatacaagtccagtaaaagcatacgaagaagctggctacagtgttgtggctatcgatttggaagccggcaaagaagttaccggtaagcatggcgagaaagtaaagattgacaaagccatctctgatgtggatgcaagtgactttgatgcacttttaattcctggaggattctctccggatttgcttcgtgcagatgaccgtccgggtgaattcgcaaaagcatttatcgaaaacaaaaaacctgttttcgcaatttgccacggcccgcaagtactgattgatacggatcttctaaaaggcaaagatatcacaggctaccgcagcatccgcaaagatttaatcaatgccggtgcaaactacaaagatgcagaagtagtcgtcagccacaacattgtcacaagcagaacacctgatgatttggaagcatttaaccgcgaatctttaaacttgttaaaataacgagaaggcacagactgttcgggtctgtgccttttttaaaattaagactccttctttacattctgaaagacagcagtcgcgtcccacacattcaagccaaattgaccttctgaaaatgcggaatcatttgcatcaatcacaaggcgatcatctaaatagattttaaagcgatcgccctcggcctctgttttcagatgatacttttgattaacgtctatcggtgttttgtattcagcaatgacagaagcaacaccgttctcaaatttaaagaatttcactagatcatgctttgcatccacattggcaaggtaaccgtttttggcatctttgtcagagcgaaacattagtgctcctgcccctcttccgtttccatccttaatggtgatatcagattcataagtgaagtctgacccggatgctgaagacaagataaaggaatctccgtccgacctcccttgtttcccctcaattgtgtcggcccatgtgccatttacagtcgtccagccagtcatattggacataaaaggtgacgttccccataccttttttaaagggtgtatggttaaagattttacctttacgccgccatttgcagcatataattcaagccctttgcttgatcggtctgggagaataatatccgttatgacctgctttccgtcattcccaaatacttcaaccgaggagcggtcaacaaaaatgcgcatcttaaccttcccatttaccggcttcaatggggctgtttcttttccggtgttaaaggccggattaaaggtattgttgcccgactcgctccggtcaacgaacaatttggcgttccttcggtcatagccgaccttcgtaaattgattttcacctgttcggaccttaaaaccaaattcagcagctgaaccagggcttactttaaattctgcatttatttcataggcatctccagattgccccgctaacacattatgacttgcaggcgatatggtcagattcttccacttcttagaggttccgcgaatggtttccagctctttcaccggtgtttggaccactctaaccccttcggtaaacgctttcaattttaactctcttggaatggacgttgcacttctccatggggatgtcggaacatcattcgcatattgccaattgctcatccaccctaaccatagccggcggctgtctgtggatggaatatcagaccaggatacagccgcataaaagtctctgccgtaatccgtccagagaactttgtttggcgggttttcatttttaaaatgagttccatcaaagtcccctacaaaatattgcatgcctgatcctcccgagaccgctccgtttccgacactgacctgcatgacccatttcttttgattcggattgccgtctaccggaagctcaaataaatccgggcattcccatactcccccgtggcttccttgatcctgtccaaattcacttgcatacgtccactgcttcagattttttgatgtataaatgaggattcggtcaccggccgcaagcaccatcacccactttttttctttctcataccaaaagacttttggatcgcgaaaatcttttttacccgggtttggaatgacagggttgccagcatacttcgtccatgttcttcctttgtcgttgctataggcaatactttgcacttgatggccttcccgatcctgtgtataaatggccacaagcggcttctctttgcctgtttgaaaaccgcttgtgttatttttatctacaactgcgcttccagaaaagatcgtgcctttttcatccggatacagcgcaacaggaaggtgttcccatgtaaccaaatctttgctgacggcatgcccccaatgcatgggcccccactgaagcccgtatggatggtattgatagaacaagtgatattccccagcataatataccattccgtttgggtcattcatccagtttgcctccggtgtgaagtggtattgaggacggtaatcctcatcatagtagcttgaatcggctgcatctgccgaaaatgccatagtcaacagcagggtgaacatgatcatgacttgaataagtctctttttcatttgttccttcgctcctctcttcatgtttgaacactttcaagagagactgctgcgcaagctggtccgtttctggcaattctcctctgtttcactgttatccgaatgatttatatatgaaaagactgctgcagtttctctctctttccttcacacaccttatgctaagaatccagcccaatacccgagaatcccgatgacaaagatgccgcaaataatgagaagtggattcacccctttgcgaagcatccatgccaccaataacgttaatccgagaggcagcgcccccggcataatgctatctagcacgttttgtaccgtttgaacatctacttttccgctttcatccttaatcctggatacaacgattggaatgttgatggtggtccatttggacacgagagcccccataacaaataacccgagaatcgaagcgccctctgtaagcttttgaatgcgattccccgctaaatcctgaagaatctccattcctttcacatagccatactttaatccgtaatattttgtgcttaatcttatggcattcagcaagaaaaagaatagcaaagggccggcaatgtttcctcctaaagcaagggaggctcctagcgcagctaagacaggacgaatcgttccccaaaaaattggatcgcctacgcccgctattggtcccatcaaaccgattttcattccgcttatcgcttttccgtcaattcctttattgttcgccatttcttcttccatggctgccgtcacgccaaatataggcgctgtcagccacggatgtgtattaaaccattccaaatgccgctgtaaggcttcgtttcttttcgctccgggaccgtacaattttttgatcgccggtatcatgacataacaatatcccattgcctgcacacgttcgaagttaaaggaaccgagtaaaaaatttgaacgaataaacatgctgaaaatttctttcttcgttaatcgtttttctttctccattttttcttccccctcatcgtttaggcatcaagatcatcatcatcgtcatcataaacagcaacactgccactgtctgatgcggccgcgactgctccgtgagcgctttgtttttgcatcacctgctggtataaaagcgccagacagagaccaagggctccaaatcccactaagttaaaatcggtaaacgccgctaataagaaaccaatatagaaaaatggctttaaataaggaatattcatcatattgatcaccatggcatacccgactaccacaataatgcctccgcctatttgcagtccttttgtaatgacatcaggaatatttcccaggaacgcctgaacagcgctgacactaattaaagcaacaatcaatgtaggaatcatgacgcgcaaagcttgaaacaccatcgcggtaatatgcataatttcaattccttttatatttcccgcttttgcatattgatcagcgcggtggatgaaaaagacagtgatcgtccgaacaaaaatcgtcagcgcctgacccgcagctgctaaagcaacagcgacagcaatcccctcgccaattccttgatcagcggtaataactaaaatggttgagatgacagaggcgatcgctgtatcaggtgccatggcaagcccgacgttcatccagccgagcgccatcagctccagtgtgcctccaagaataattcccgtttttaagtccccgagcaccaagccaaccaacgtacaggccacaagcggccggtgtgtctgcccttcatccaatacacttgcgattccggtgattgctgcaatgattaacaacaaaataatttgtaatgaagacatattctcatccccttgattattttgctacgttccgtaaaatctgtacaaaatcctcactggcatctgaaggcagctgcctcaattccagtttcacgcccttgtcacttaatgtttcaaatgcctttatatcttgttctgtgacactgactgattttgtgatttgcctgcgatgattttcaaaacgcattcccccgacgtttacggttttgatcggtacacctgcttctataagagatacaatatcggacggattttcaaacaagagcattgccgttaccccttcgtagcgcggactatgaaatgcttttgccattttagaaaccgagacggcactcgcctttacatttgaaggcgcaacagaaaggatcagcgtttttctcatttcgtcctgagcaatatcgtcggagacaacgatgattcggtcggctgcatggacttttatccaccttgtcaggatttggccgtgaataaagcggtcatcaattcttgctaacacaatgttcatcataattcatcctctcttgtatcttgattggctgtttttactttttctaaatgttcactgcacacttgaaagctttgctgactcattgcttttaagttgttcagcaaatctttgagagccagatgttctctcaggcttaatacctccagcagaatcggcaggtttacgccggctgccatatccattctttgatcctcagcaataaaggaagctgccgcgttatatggcgtccctccaaaaatatcgactaaaaaaagcacttcatgttcttccgggatatccttgagcgcctgatgatatttttcttgcagcgtttgtattccttcccctttaaaaaacggcactgcaatcaggttattttcttcaccgaatatcatccctgaagattcttttaatgctatgggaaaatctccatgaccgctgataataactgaaatcatatctattgctcctttcctgttttgtacatccatatataatgcaaggatcgtgccaacacagttgtgttaagcgttttcattgttatttcagccaatagcaatttgttgtcgaaacacttaaaacgaaaaaaataaacctgtattaaaatggtgttccatttaatacaggttcatataaaaaaactgtttttaaaacagctggccatgcacttcttcagcaaatatggcggctataaataatttttcatcatcacttatgcgaagtccgagcttttcttcataaggggctaatgttcgttctgtcacgtacaccatttccttcagctgatcattgatctcttcttcctccgagaaagcgatcggattctgcttaattaccctttcaaaggcgaaagccgtgtgcataatgactttaatcaaaaccgcattattgaaaatgacccccagctcatcttgaacggtttgcagccactccaataacatttcgatcacatggtggggattcaagaagacaaggtattttttcaggctatcctcgcaaagctccctgacaataatatttgcttcgttcaatccattgctcaaggggatgcttccttttgtaatcgcctgttgaatcagcttctctccctccccttcaattaacacttctaaagatacatgcggagcattgattttagggtctttcgttccgactgtcgcaaggatttcatactctttttcgatttcttttatgctgttggccagtttaatcgatgatacggtcaatatgtgaatcggggtatcggaggccttgtttacgatcgtggttagaatgtcttccagctttttggccgttccgctgcccgtcgtgcagatggataccaatgccttctttttgccggatgccgctggctgacgctcccacagctcgataaaatccttcgtgaccgattgatagatcgcatgcaaatttaaattcaaatagttgacctttctgacagcatccagcaccattgaagtcgtaacattgctgatcgttttgatggaaatacctgtcttttcctccagcctgctttccagcattgcaagcgaccccatgtctaccagcattaaaacaccttcaccttcatcaacctgtttcattttttctgctacgcattcaagaatgtccgaaggtgaaacagaaagtggcatatcgactgctgcaatcggcgtgctccctagcagttctgtcgcaacttcaaccatcgaactcgccgtgctgtttccatgagcagccacgatgataccgactcttttgttctcctttaacgatttgatggaatggattaacatcgttaagtagatgacttctatttcaggaatagccactttaaaatattcctgaattttatctttaaaaatcatcgccacccgatattctttcacatgagtatcacgaatttcatcagtctcctgtgtattcaaaacatcaatttgctttcctcgctttaaaaatgcgtcaatatgcatactcaagaaataaataaacttgcggtcaaatgtacaatccagctcatgttcagctatttcttttaactgttttgtcatttgaatcacgtcatcttcaacgaatgtcagcaggttgtctttttgaaaagcttgatgatgaaaaaaacttctgacatgcaaatggacatcagtcaagatgtattggttaatatcctttttggataaaccttctttcataagcgttttcactttttcctcaatcaaatgatataagttaaatgaaaggtcttcgtcaatttttgttgtttcatcttctacaatcggagagataatagttgtaatattgacatattcagaaatggctttgcttctttgcatgtttttgctgctggacatccattcttgcttgatttcatcaggcagatcgcgaacagtcagttcaataacctcatttctgtcaaggttatgcaaaaatccgtgtgcgcaaactaactggacatttgatttcagctgtccgacattcccaaatttcgcagagtgaataagcgcattatagacatcgatatgcacactcagattcttcttaatccgctctgcttctttccctaataaaaacgtcgtcagatcgactctttctttaagcgatcgttcttcaagcgaaggaatatgaatggtcattgggattcttcgcaaaaacgttttcaatagtgcagaactcggattttctgtagtcgcacaaataaacaatacgttcgatgttcgtttatgttcagattctccaagcctgttataagaaccgctgtcaataaaataaaacagcatttcttgtccctcgggagggagacggtggatttcatccataaaaagaatgcccccattggcctgttcgactaaacctgccttatcctcggcagcacctgtaaatgaaccttttttgtgtccgaataattgagaaagcaataattgagggttgttgtagtagtctgcacagttaaatgtaataaatggtgcgccggccttcaatatgtcagagtaaatggcaaactggtaaattcggttcgcaaaaagggatttaccggaaccagtcggccctaggaggagcatatgcagaccgttcggcggataaaagacagctgcttttgcctgggagatcgctttcttcaaactcccttttgcccctatcataagctctaggggattcgtggaaatgtgttgatgattttgctttgaatttccggaaaacgcctgaaggtctttcacttccatcatctctgtatcccatttcttgttgaataatttttctgctatctcgactgggatgtatcttacaggaaacgttttaattttgatgacctttttggaccggacgagattgttcaattcaaagctgacattggaccgctccattttcagctgctcggcaatctcctttgctgaattcccttgtatttttaaaagatgatctaaggttgaatcatgaaaattatgcttgagctgatggtatattttatctattcttctcacgtctatcatcctttgtccttattagataagccattaacaagaatatttcgaaaatttatagtccgcgttgagattatctgctgatacacgtttaaaaaggtctctatagcagattgacaaaactggcttttatgcgtatatgtttacatgttgaatcatttgcatctcatattagtatgatagatgctcagttctcgagggccagtccccttcaaaagtaataatcagtaaacagtttatcattctcggggaatgtaatgatgtcaaaatcatcaatgacaaaaaatgaatcttatagatcatgacaaattacccaaatataaccccttaagttcgctcacaactaaaaagacgggcactctatgtgaccgccacagtattacaatttgcaaaacttcgtcatttttgcaaagttaaggaatctgtaagcttaaaaactttatctccgatatctctcgatttgatcccccctgtaggcctcaaacatagtgggtatgcaattatacaaatcgttaccgattaaaactagcctgtcagattgtccaaatgactttcctgttttactctgctattcaggtagaatcaggagtgaaaatagagccacaagacatgtaacagcacttaaaatagttttaaaatttaaaaataaaagtatctattcttttaaatgttataatatccgataaaactttacacatctttttattactggaggaaaataaaattgataggcaattctagcaaagacaattttggccagcaacagaaattgtctagaggccttaaaaacaggcatatacaattaatggcgattggaggtgcaatcggtacaggtttatttttaggttcaggtaaatccatccattttgcaggaccatccattttatttgcttacttgatcaccggcgtattttgctttttcattatgcgttcgctcggagaactgctcttatcaaatgcgggataccactcttttgttgattttgtaagggactatttaggaaacatggcagcatttatcactgggtggacctactggttctgttggatttccctcgcgatggctgatttaacggcggtcggcatttatacgcaatattggcttcccgatgtgcctcaatggctgccgggtcttcttgcgcttattatcctgctgatcatgaaccttgccaccgttaaacttttcggagaattagaattttggtttgcattgatcaaagtcattgccatactggctctgatcgtaactggcattttcctgattgcgaaaggtttttcggcagcttccggccctgccagcctcaccaacctttggagccacggcggcatgttcccaaatggatggcatgggtttatcctatcgttccaaatggtcgtcttcgctttcgtgggtattgaacttgttggactgacagcaggtgaaacagaaaatccccaaaaagtgatccctaaagccatcaatcaaatccctgtccggattttacttttttatgttggcgcacttttcgtgattatgtgtatctatccttggaatgtgttgaatccaaacgaaagcccatttgttcaggtcttctctgcagtaggcatcgttgtggctgccagtttgatcaattttgttgtattaacatcagccgcctcagctgcaaatagcgctttattcagcacaagccgaatggtctattcacttgcaaaggatcatcacgcacctggactattaaagaaattaacttcttctaacgtgccaagcaatgcgctgttcttttcatccgtcgccattctgattggcgttagtctgaattatttaatgcccgaacaagtctttacactgattacaagtgtttctacaatatgcttcatttttatttggggcatcacggtgatttgccatttgaaatatcgaaaaacaaggcagcatgaagcgaaagcaaacaaattcaaaatgcctttttacccattatccaactatttaacacttgcatttctcgcgttcattcttgtcatattggcactggcgaatgatacacgtattgctttgtttgtcaccccggtctggtttgttttattgattattttgtataaggtgcaaacccgcagaggacataagatgaaataaaaaaaagacaagggatactcactcccttgtctttttatatgtgtcaaacactaaattaaactttggtttcaaatctcattcacttcatttaagtgttaactcaaaccagttttgatgccgaaacctactaatattattccggtaattttttgaaacactttctggaacttcgagtttttcatccatttttttgcgtaatcaataatataaacaagaaacagaaaccacaacaccgctaataaggttagaattgaagctaaaatgataagctgctggtttatatttccgttcaaattgataaattggggcatgattgtaacatacactaaaacagttttaggatttagaatgttactgagtgatccttgcataaaggaagttttataataacgtttcggagaacttgccatattttttgcttgggattgcatgtcatctaacgaaaacatacttttagcaaaaaagctttttacacctaaataaattaagtatgccgctcccaaatatttgatcgttgtgaaaagaatcactgactttgcgattaccactgataatcctaaaatggcaatcaccgtccaaaaggaaagtcctgtcgccaatccgagaatgttataacggccggctttcggaccatacctaagcgtatttttcatcacaagcatcgtatctgcccccggcatgataaccatcatggcagcgatcggtatgtatgcgagtaagctgtgcattgttctctccccctttaaaaatcccctcaatcatatagtgactacaaaagtaactacttataaaagtgtatcaatgcatttggaataaatcaatatggtttgttaaaatagcgattactaaggcagcgattgctctttatattggaggatatatgaaagaaaatatgttagacattttaaaaaacctcaattttacagaatatgaatcgaaagcgtatttggcattattgcaagaatcacctttaacaggctatgccgttgccaaaaaatccggagtgccccgttctaaaatttatgaagtcttggaaagccttgtcataaggggagatgtttttgtcagtcatggaaatacacctcagtatgttccagtccccgcaaaagaactgattaaaaaccgccggctcaaagcggaagagcattttgatcaggctgagaaatattttgaaaagttcgagcagactgctaatgaccgggaaaacatctggaatatcaccggccgcagtgaaattcttgaaaaggtgaaggcttgtattttatctgccaaaaaaagaatcctcttagaaatatggaaagaggattttgaggagatagaatcagagctaaaacaggcggcagaacaaggcgttattgtcaccattattgcgtacggagacatcgtatctgatttttccaatgtttaccttcatgatatgagcagtgaaattacagaagagtatgacggacggtggcttgtctatagcggagatgattcagaagtagtagcgggcattgtctcacttggcaatgacagccgtgctgcatggacgatgcatgtaggtttagtcatgcctattactgaagtgatcattcatgatctgtacctcatggaaattctgaaaaagcatagagagctattagaagagagcttcgggaaaaatctcatccagttgcgccgtaaattttctattcactcagatttcaaaaaacattatttggaataatgtttggcatctcttaccccaaaaacaaggcttgtacaaaacaagccttgtttttttatgcataaaccccccatccccatgctgatttacttctctcttttaaaaaatgtgattctgcgcaaactatttttcagcctgccgcgtctatcctaggtaacagcctacgatatacgtatattcaaaaaggagccctttattgcaatgaagaaaaaacaaacaacaaaagcgttgcttgtcacatgcataactgatcataagcaagatttctaccggttggctttcagttatgtgaaaaatcaagatgacgcattagatattgttcaagaatcgataaaaaaagcgctgagctcagttgaaacggtcaaaaaccctgagacgataaaaagctggttttataaaattttagtacggacagccattgactttttgcgcaaacaaaaaaagataagagtgatggacgacgaaacgatagaatttttaagcaaaggaaaggaagaccattacaaggatactgatctccatgaagcgcttgacgaattgccgtaccgctataaaaccattattattttacgtttttttgaagacctcaaattagaagaaattgcggaaattacaggagaaaacacgaataccgtcaaaacgcgcctatacagagcattgaagctgatgcgcattcagttgacgaaggaggatctttcttaatggataagagattacagcaattaagagaagaatataaaaatgttcagattcctaaagaattggatatcattgttgaaaaagcccttcagcaagaaccaaaaaagaaaagaatcgtcatgtggccgacatcagcagcaatcgctgcagctattttattcactgcacttgttaatatcaacccggacgccgctcaggctatgtccaagatccctgtcatcggcaaaatcgtcaaagcgatcacctttattgaaatcaaagaggaaaaagaccaatcaagcattgatgtcaaaacacctgctttgtccgggctttctaataaagagcttgaaaacagcattaaccagaaatacttgaaagaaagccagcagctgtataaagagtttatacagtccacatccaaaaacaaaaaagggcatctcagcatctacagtgattacgagacggtcacagacacgccagatttactctctatccggcgcaatattgaaacaacacaagcatcttcctacacacaaagccgttatattacaattgacaaaaagaatgatattttacttacattaaaaagcttattcaaagatgagcgctatatcaaagtcatcagtcaaaacatcaaagaacaaatgaaacagcaaatgaaggaagatccaaataaaatatattggctcactgacgaagatgcagaaccgttcaaaacgattcttcctgatcagacgttttacattactgaagaccataaacttgtgatctcatttgacgaatatgaagtcgcccccggctatatgggcgttacagagtttacaattccaacccgtgtcatttcaaacttgctcgtgggagaacgttatattcgataaaataaaaacatccatctaagattatggatgttttctctcttctctattcgaggtcgtaacctcgctaccaaaaacaacgagaatatttgcatactattggaggaatacccatgtatcacaagacacagcatcatcgatacattcctggacttgatggccttcgggctttcgccgtcctgtcagttatcacttatcacctaaatttcaattgggctaacggtggttttatcggagttgatatcttttttgttttatcggatatttgattacatctattctattaccggcatatggaaatgatatcaatcttgattttcgggatttttgggtgcgccgcattcggcggcttatgccagcggcttaccttatgatcttttccactgttgtgtgggtcgtattgtttgatcgagaactattacacactgtacgtggagatgcgatctcttctctcttttatatgagcaattggtggtttatttttcacaagctatcatattttgatagtttcggttccccatcacctctaaaaaacctttggtctctggcgattgaagaacaattttatatcatatggccgatgttcttagttgttggaatgtacataatgaaaagccacgccagattggctgcggtgatatcattgcttgcgctttgttcagccgtgatgatgagcgtactgtatgaacctggcggagatccgagccgcgtttactatggcacagacactcgttcgtttgaacttctcatcggatgtgccttggctttggtatggccgatgaaaaggctgtcttccaacaggctgccaagcaaactgaagcacactttgcacgccactgaattttcggcattttgtattttagtgttatgtgtctatttctcagatgaatacgagccttttctttacagaggcggaatgctattcattagcgtgactgccgcaatccttattgcatgtgtttgccatccgagcagctttttaggcaatctgctttcatggaggccgcttcggtggcttggaacgaggtcttacggaatttatctttggcactaccctgttattgtgttaagcacgccagttcaagaaatcggaaaccctgttttttggcatatcgtgctaaaggtcattgtgacatgtatacttgccgagctttcctatcattttattgagaagccgatacggacacagggatttaggtcatttttccgccgtgtttttatacatagaatcatagaatggaaaacgacatctgtcatcagcaaactgtcaattggtttcgtcattttcgctatacttatttttgcaggagggctgtctgggttagccggagagcaaaagcaccctaccaaatggacctatagctcacaagaaacaaatgctgactccagccaggcttctggggataaaaagaacgctgcagcagataaaaaacactatcctgaacaaaagacaacagaatccgatcaacgtcaaaaggaaaacaaagatagtgggcaagagactcataaaaagaaagacacgcaatctcaacagacgaaaaaaccagcagacactgcgaaagaggtgttagctataggagattccgtcatgcttgatatttcttcacacctgcgtcagtcattttcaaatgtgacgattgatggaaaggtaggaagacaaatgtctcaagctttggaactcgcaagggagtacaagtcttttaatcagccgaacaaggctgtcatcattgagcttggaaccaatggctactttacaaacagccaaatcgaacaactgcttcaatctttctcaaaagcccatatctatcttgtcaatacacgggttccccgccaatgggaaagcaaggttaatgaatctttacagcaccaggcaagcgcacatcaaaatgttacgttagttgactggcatacagaagcccttcagcatccggaatattttacccctgatggtgttcacttggttcctaaaggggcaaaagctttgactgctcttattgttcaggcgatgaaatcgtaaaaaagagatcctatacggatcacttttttactttagtttctgatcgttgattatgtcttctttcagcaaggcagcccttatgtttacatgccgtttacgtaagggtaagccaaaattgaatggagggatgataatgaaaggaaatgaagaacatgacatccaaaaagagttgaaacgatatgagctttttttcaaaaaacgatataaggttctttatacattaaacgattttatcatcggtgctatgtttctcgttggaagttttttctttttctatgaccggttaatgtcggcagggatatggctgtttgcgatcggaagtttgctactgttaatcaggccgaccattcggctgattcatgactttcattaccgtaagcatgtggaacagcaattcaagcatcaatcttcaacagatgactgatcttaaggaataagaaagaacaaaatgccaaaagcctgagttgaaaatcaaaaacaagactttcagactatttatttttgaaaataaggtaaaaagaactaaacttttgcctctgcatgccgatatgaataataaggccggcgcgatactccctataacatccttttcagtagatttcattatcgtgccggttttctcatatgcaaagcaatcccgccaatcagattggcgggattttatattttacattcctgtccaaacgtcttttacataacgtttttgatcttgcagcttttgcagccattcagctgattcttcctgacttgctcctttttcagcttcatacgccaatcgcaaagttttctctacatcaggagccatttgcgatccatcaccgcatacgtaaatatgagcccctttttcaatgagtgtcatcaatttctgcgtatcttgcttgagcaagtgctggacatatccttttggttcgttttcgacgcgcgagtagcatcggcggattgtgaccaaaccgtcctgttccgcttgatccagctcttctctgtaaaggtcgtcatggtccgggcgacggcagccgaagtataaaagtgcttcaccaagggtgcttccttccttcttcaaaaccgatcttgcctgaataaagcccctgaatggcgcaattcctgtgcccggcccgaccataatcataggcgtttcaggctcatccggcatctggaatccggactgcggggtacgaatgaaacaggctgctgcatcatctgtattcaattctgctaaataattagaggcgacaccccggtattcacctcggccgctccatgctgaggctttcacaactcctaccgtcatgctcacgatatttgcatgaactttcggtgagcttgaaatggaatagtatctcggttttagtgatggcaaaagtgctaaaaaccgttcaaacggcatttcgcaagcaggataatcctctaaaaaatcaagcatggtaagacgtcttgcaagtacctgctctttgtaaatgccatcatctaaaacgagctgttccagctctttttgatgcggcggacagactgtataagaggccagctcccgaagctgaagccttgatgccggttcctgcagctctacataggacgacaataaatccgcaactttgatcggccgatccatcggcagatgagacatatgagcgcttccgcttacttttatcacatgattggactgcaaaccgaatcggctgagaacccgctgaacaagctccctgctgttcttcggcaggattccgatatgatcgccttctttatatgttttaccagccggaatttccaattcaatatggcgggttgaacgcgtgctgtcagctgtctggagttctcgattctctaacacaatcccttcaaaggcgccatatgctttagcaaccggcgtttccgtcgcttcactgagaaaagtaatcgataatgaaggcctgtcttctttctgggctatttcgttaatgtcaaatgcgtccattgtttccttccagaagcggttttcccaagactcgcggtggctttcaaaatcatcggcggcgtcaccttccccaatctctgttaaacgcgatgccccctttgctttcatcatgtcatcaatcaggcggggaatccgctgatacgtgctggcccagctccggtttccgcagccgaataccgcataggaaacacctttcaattggccttcctcaagctctttcagccactctacaaagccggcagcattatcaggcggcgccccattataagaagccgttacaatgacgactgcccctccttcagggagcttgccgatataatcatcaagcggagccgtttcagctgtaaagcccatctggcggccttgagcagccagttcaccggctattccctcagctgtcccaagatttgaaccaaaaagaacaagtaaaggtgtgccgtgtttaggtttggtttcttttggctttgtttctgctttgatgtctgcctgttcttttctctgtacattgattgccgctgttttccgcggtttcacagtaattttaaaatcatccggcttgatcgttaatgcttctttgatttttagttcgtagccagtatggtttatcaattcaaaatgctttaatacaagaccgagaaccattgtcgcttcttgaagagcaaactgcatgccaatacaagcgcgctgtccgtttccaaacggcttatacgcatggtgagggatacttgaaggatcctcaaaccgttccggacggaaatcttccgcatccggtccccaagcgttttgatcccggtgcagttttggaattaaaacagtgactggctgccctttgctgatcggatattccccgcctagaacagtatcctccttcgcatatagagaaaaagccggagctgttggatacagtctgagggtttcatttaaaaccatccgaatgtatttgagctgctggatttgtttatattcaggcgtgtcatccgttaacacgcgatccgcttcctcctgagcttttttcagtttttccggatgtgtaagcagacaataaatcgcaaaggaaagcaaaccgcttgtcgtctcatgtccagcaattaaaaatgtgatgatttgataccttatgttttcatcatccagcgtttcacccgttactggatctttggcataaagcatgagagacaagagatccttgatgttatcatccggattcgcctttcgctccgctatcattctatcgaccagggagttcatgacttctatatccttttgaaactgcagcttcgttttcaccatcatcttatcttgcaggcccagtctttttgattgattcatcgcctcttttaaggcacggagcatactggtgataaacggatgctgtgaatcacggtaaaagctgttgaatcgatagttaaatccgcataacccaatcgtatcaagcgtcagacgtgtcatatcgtctgctacatcaatttcttcattagggtttaaccggctccatttttgaatcagctgggttgcgatatccagcatcatagaatgatagcctttcatcgctttttgactaaaactcggcagcaaaatgcggtgggctttttgccagttcggttcgtgcgtccagcttgtaaataagccatctcccccgaattcgcgcaccttttgcaagcctttgccaaggttcttgtcaaagcggctttcatcacacacttcagccacaagattgtgacccgatacaaaaacactggatactcccggaaaatcaaaacggaaaatcggccccaattcatcagctatccgccataaggattgagaaagctgttctttttcaagatgcggaagattttttaaaggtccgtatgttttgggctgaggtattgcgcttgcctgtttcattaacatctccctttcctatttttgtgatgaatgaagcttaatggcgtcccagcagcattgttccaattcagtaattaaatcagtgtccatctctatatcacctgtttgaacgagctgatatatcttgagaaacgcccctaatacaatcgcaattaacacattagagggcaggctgcgaatcacgccttccgcttttcccttattaaaatagtcatcaagcatttgagtcagattttctatcatttttttgcttgtatgatttaagtaatgagcgtcttttttggtttcaagaaaaaaaagcgcatagtcgctctctttcgtaaactgaacgagacagcaaaatacgtggtgaaagccttctctgacaggcaattctgaaacgtcttgcttcagtttttccgtaaatcgctggatgctttcttgaaacagtacgttaacgagtgtttctttgctgtcaaaataacgatagatcgttcctgtccctacatgagcacgttcagctatcataggaatagtggtagcgtcaaaacccctttccgtaaaaagtgagactgacgctttcataatcatgtcgtatttactgctggatgcggatatcatgtaatctgacaacctccgattcgtttacggaatgaatattcattccttttgttcacaaagaatgtctgccctgtctgatatcacctctttgttctttcttctgttataagtttatatgaaaaaaactttttttaatataaagtatatgcaaaaaataaaaaattaagaaaatatacccaaatcctaatacaaggatcttggatatatttcccgagaaattttttatttaacagccacaatacatagacaggaagcacgcctgataacagaaagatccctgaaatgctggtctttcagcagttgaatatacgttttctctttttcaccggtatttgtgtcaatactgatataaaaccggccgtcaatttgaagcaccctgtaaatttctcttaatgcaagcctaatatcggtgcagctttgaaccgtatgtaaagaaaagactttattaaaggtacggtcatcaaagggaatgtcctctggatagccatgaaaaacctccccgttccccatgttctttcgattcgcacgtgatatctgtcttacctttcgctttgaaggatcaatgctttttaggcttcccttttctagtttcttggttatgcttttaaagacagtgccatttccaattccaatttctaaaattctgtcatttccttgtatatctatagagtcaatcatcatatgctcaattgttttggttagcttatatttccgagaaaataatttccaaaaattcgatcgtttatagagtctattttctagcattttaaacacctgcttttggtttcctatgtttatttattatattcaaaaaataaacatcatcttcattctaaaagtgaaggaaggtaccaactagacggcaatgtattgaaaaatgtttcaatagaactaaactttttcatttttttccgcaaaaaaagcagaaaacaaaatgttttctgccctctttctaatgccaatgataagggaatacatacagcctttgctgctgcattgccatcagcctctgctgtcggaatggatttccataaccatgtttgaaggaatgcggcatggacgcataaccatggccaatcgacggcagccttttttgataatcgttcatcatgccatcacctgcctcacagtaacgttgatttattgtatgcaggcaggcattttcttgacagtcatatcgctaaacttggtccttctccattgtataatgcatcaataattccattctaagcatatgccattcccccttcagtttttttcgttgcttttagcgccagtttgttaaataaagatgctttaactgagactctttcatttcatcataaatctgctcaatctgctgttctcgttcgaattcttccaggcttttaaaccgtttttttatcgttaacgttaaaaagaataggttaatcgtcatatcgctcaccccctttcaaagtccgcatcaagcgaaataacccgcggcacaccccttctgccgcgggcaaataaaaaccgcagacaaaagaagacaccaatgcctctactgcctgcggggagttgcgtatgtccgactattccgaatttaatgcgtgcgataagcatcggttaaggaaggacacgaactcttccacaggctgaataaaccatgaacttttacatgtgtatcacgtacaggttgacgtcgttgtctcattgtcattttggttcagcctcctttgctttttttcttactttgtaagtatatccaccaaattccattttgtaaacatctttttctaaaaatggacggaaattgtgcaaatcatcgaatggatttgcccgttggtcatgacacctgcttcatttcttttctggagcggtctttcttatgatatgcaataaaataaatgagaccgacaaatacagctccgccgatgacattaccgataaaagccggaatgatgtttccgatgaactgcccccacgtgaatgagcctgcaaaaatggcagcaggaatcacaaacatgttggcgacaacgtgctgaaatccgatagccacaaaagccatgattgggaaccagatgccaaggatttttcctgctgcgtcttgggcgccgaaagaaagccacactgcaagacatacaagccagttacagccgatggcggaaatgagaaccttgccaaagctcatatcaagctttccttgggcaacggcaatcgttttttctaaataaggacctgtttcagtcaatccaaccaaatgcccgaaaaagtacgcaacaaacaatgcgccgattaagttcataattgtgacgattccccagttaatcgctaactcttttactgatatttttctcgaaaataacgccattgcaactgacatcatattgcctgtgatcagttcagcgccagcgagtacgacaaggatcaggccgactggaaatactgctgcaccaatcaaactggacaggctcccccattctttcggaagatcgccgattaccctgatatcaagcaaatacccaagcgcgataaatgcaccgcctaaaaaccccagcacgagcagtgacggcagcgggagctttatttttttcatccctgcttcaattgctgcttccgctatttcatccggttttcgaaaagccataataaaacgcctccattacttcttcttttctcacagttatgcaagaaaggcaataaaaaaggcagcactcaaataacctgtgtcaaaccaggcgtttgaatgctgcctaacttgtatgcatacccatacaacaatatcaagcagtatgaagatattgaaagagaatatatacagttcgtgcatacattccattgctttagccttctataactgtagcaacatcatatcaaatgtgacaaatttgtgtcaatgacaaatatactagctttgcagaacttctttttgctcatctatttttcggtcaaaaacaaatacagatacagcgatgttttcctcaattttaatatcagaaaacaaatggactagcttagctcccatgagttcctccattccttccggtgtttgtttggaataaaggtcttgaattaggcttgtccgggccgcatgtaccatctctcttccttcaggcgtgcgggcgataaactgctcgcttgcactcagatttccatatagtgttgaaactgccatgttttctacaaatacagtatgaattctctcaggcccttttccgaacaattctttgcgaagttttcgaataatatcattgaattcatgaatttttttagacatgctgattaccccttccgatattgccttataaaggcttttcccggttcccctcaggacatttcacttggttaaaattttcctgccatattgtattataataaatatcacattataataaaagcagtgttgatggatttgtaataggatcttgttatgagtctatcgttttataaaaatcaaggattggtctgttagtaagacttgctagtgaactattccgccatgtgtgtttacaccttcttagaattaagggcaggtgtatctctatacatggctttttttgacttcttgaaagaaagatggaggggaatatgaatatgatggacgttaagtcgatcagtgtccgtgtagacggaacagaaattcaagcacgagcaggggccacaattttagatattttaaatgaaaacggaattgagtacccgcagatttgccacgtaccagaggttgacccgattcaaacttgtgatacttgcatagtagaggcaaacggcaagctggttcgttcatgcgcgaccgttgcagaaaacgggatgtctattgatctttcaggaaatcgagtgaaagaagcgcaaaccgaagcgatggaccgccttcttgaaaatcatttgctgtattgtacagtttgcgataacaacaatggaaactgtacgctgcataatacagcggaaatgatggggatcgagcatcaaaaatacccatacacgccaaaagaagatccttcttgcgcggttgatatgtctcatcctttttaccgctatgatccaaaccaatgtattgcctgcggccagtgtgttgaggtctgtcaaaaccttcaggtaaatgaaacactctcaatcgactgggagcgcgaacgccctcgcgtcatttgggatgagggagttccgatcaatgaatcttcctgtgtcagctgcggtcagtgtgtcacagtatgtccatgtaatgcactgatggaaaaatcaatgctcgggcaggctggttttatgacaggcattaaagaggacgtcatggaaccgatgattgatctcgtgaaaaatgttgaaccggggtatggcagcatttttgccatttctgaagtcgaagcggcaatgcgtgaaacgagaacgaaaaaaacgaaaactgtatgtacgttctgcggtgtcggatgttcatttgaagtatggacaaaaggacgggatattttaaagatccagcctgtttctgatgctccggttaacgcgatttccacatgtgtcaaagggaaattcggctgggattttgtcaattctgaggagcggatcacaaagcctttaatccgtaaaaacggagcctttgtggagtcttcttgggcagaagccctcgatcttgtcgcaagcagattaggatcaattaaagagcagtacggtaaaggctctgtcgggtttatttcttcttctaaaattacgaatgaagaaaactacgtcattcaaaaactagcgcgtcaggtatttgaaacaaacaacgtcgataactgctcacgctactgccagtctcctgctacagacggattgttccgcactgtcggcatgggcggtgacgccggcacgattaaagatattgccaaagcaggcctcgtcatcattgtcggtgccaatccggcggaaggacacccagtgctcgcaacacgcgtcaaacgggcacacaagctccacggtcaaaaactgattgttgctgacctgcgtaaaaatgagatggctgagcgatctgatctgttcatcagccctaaacaaggcacagaccaagtttggctgatggctgttacgaaatatatgatcgaccaaggctggcacgatcaggcgtttattgatgagaacgtcaattactttgaagattataaagaaacccttaaaacgtatacgcttgattatgcagaacgcatcacaggcctttcaaaagaaaacatcattcaaattgctgaaatgattcgtgatgctgacggcacttgtgtcctttggggaatgggtgtcacacaaaatacaggcggttctgatacatcagcagccatttcaaacctgcttctcgctacgggcaactatcgccgtccaggtgccggcgcttatcctctgcgcggacacaataacgtgcaaggcgcatgtgatatgggaacattgcctggctggctgccgggatatcagcatattacagatgacaaggcccgcgctaaatttgaagaggcatatggtgtcgagattgatggaaagcctggtttagataatattcaaatgcttcatgccattgaagaaggaaaaatgaaagctatgtatcttgtcggtgaggatatggcactggtcgattcaaacgcgaaccatgtgcatgatattttatcaagccttgatttcttcgtggtacaggacatctttctgtcaagaacagctcaatatgctgatgtcgtcttgccggccactccttcacttgaaaaagacggaacatttaccaacacagaacgccgtgtgcagcgattgtatcaggcgcttccgacgcttggtgacgcaaaaccggactggtggattattcaagaggtggcaaaccgtttaggagcgaattggaattacagccatccaagtgacattttctctgaaatggcgagtctttctcctctgtttgccaaagcaagctatgaggtgcttgaaggctggaacagcttcctatggggcagcttcacaggtgaaagcacaccgcttctgtatgaagacggatttaatttccctgacaaaaaagcccgctttgccctttctgattggaccgagccagcggcatttccggaggaatatgaccttcatatcaataacggccggatgctggagcatttccacgaaggaaacatgacaaataaatcgaaaggcatccaagcgaaagtgccgaatgtattcgttgagatctcacctgagcttgcacaagagcgaggtgtttgtgacggttcgcttgtacggctcgtttctccgttcggagcagtcaaattgaacgcgctgatcacagaccgggtacggaaaaatgaactctatctgccaatgaactcgacagacaaggagtcagcgattaacttcttgacgggccctgcagctgataaacggacgaacacgcctgcttataaacagacaaaggtccgcatggaagtgcttggcggctgtgaaacagcgccgcttccaaaaacaaatccgcgcaacaaaaaacggcatccgcaaaacggagtcgaagcagaaagaaaatggaaccgccctggctatgtacatctgactgattaaacgataggaggaaaacgaatggccactccgattacgacgatcaaaaaagaaacaaaaacagctgagcaaatgaagcttgaaaaaatagaagaactgaaagagctgctggcggaaaatgaggacgccgtctctaaaacgatgacgttaatgaatgaactcaatgatcttggaatttttgatgcggcaacaagcatgctcagagcgaaggaagacattgccaagattgcgcttggccaagtttcccgcgagcctgtcaccaacctcatcaacacgatgatggccgccggaggcgcattgacaaaagccgatcctgagtttacagcaaagcttttagaaagcgtaatggctgggactgaacaggcacaaagctttttaaaagaagacaagaaagtcgggattctcgacctgttaaaagcaatgaacgatcctgatatcaacagagccgtcggcttcggccttcagtttttaaaaggcatgggaaaagaacttcgagaacaataacagaaaaacagccatcgctgatgatggctgtttttttattcgtcggcttcttccaaacgcttcttgtaaataagtgaacggtcagcgcaaaagaaggcaccggctaaaaatacgcaatccgctaaaaacatcgtcgatttctggcctaatgttaaaccttgatcagggagaactgcgcctatatataaaaaagtgctgactgcaagcaatgtaaaagcaaaatgcttgtagtcttcttttaaagatttcattctatttttgttcaaaagaatcacctgccagattcatagtatacgactattataatataatccggcggcttacagagaaagtaattctatccatttgttatatattttcaagcgcttggccgatatcttccaacaagtcttccgcatcttcaattcctacagaaattctgatcaagccgtccgtaatgccgagctcaagccggcgttctctcggaatagaggcatgtgtcattcttgcaggaacagaaattaagctttcaaccgcccccaggctttcagcaatggtaaacagtttcagatttcctaaaaacgcatcaacccgttcttcactgccaatatcaaaggagatcatgccgccgaagcccgctccttgcgtttttgcaagctcatgtccgggatgatttgaagaaccagggtaatataacgtttggacagcagggtgattctcaagaaagcttgcgattttccgcgcattttgatcgatcgcttccattctgagtcccaacgttttgattcctctcattaacagccaggaatcttgagggccgagcacgccgcctgtggagttttgcacaaaatgcagctcttctccaagctctttcgaagctgtcacaactaaacctccgacgacatcactgtgtccgccaagatattttgtcgcactgtgcagtacgatatcagcgcctaaagtaagcggctgttgaaaataaggagtattaaaggtattgtctacgataagcagaacacccgctttttttgcgatatcagccatgagcgtcaggtcggtgattttgagcaacgggtttgtcggtgtttcaatataaattgcttttgtattagggcgaatcgctttttcaacttcttccctgctgctcgtatcaacaaatgttgattcaatgccaagacggttaagcacctttgtcatcacgcgatatgttccgccgtacacatcatcagtcaacacgacatgatctccgctgttaaacagcatcataaccgctgtaatggcagccattcctgagctgaacgcatagcctgcttccccgctttccagttctgtcacaagtgcttcgagagcggttcgagtcggattggccgttcttgaatactcgtagcctgtatgctgccctgctttcggctgcttgtacgtgcttacttgataaatcggcacggaaactgcgcctgttttctcatcacctgtgattccgccatgtatcatcaatgtttttttcttcatatcagatgcctccttcgtatatttgtttgctgatatatcgatcgctgctgtcaggaaatactgtgacaatgttagttccagcggatgcttttttcgcttcctccaatgccgcataaagcgctgcacctgaagagcttccgatcagcaggccttctttttctgccgcttctttcacaagtctaaacgcattctcatctgttacggtgtagatctcgtcaaaatggctcttatccatataatcggggataaactccatgccgatgccctctgttttatgagcgtggggctctcctccgtttaaaatcgagcccaccggttcaacaatcaccgttttgactgctggatttttttcttttaagaaggaagctgtccctgcgaatgtgcctcctgatcctgcccctgcgacaaatgtatgaatattcccatcaagcgcttcccacatttcaggcccaagcgtcttatagtaagtcgatggatttactcggtttttaaattgcaaaacgcaataagaattttcaatttcagtctccagctgaatggctttttgaatggcgccctgcattccgtcttgacgcggtgtatgaatgattgatgcgccaagcgcttgcataatttgctgtttctctctgctgaaatgttcagggacacagaaaatcgctttcagcccatattttctggcactcagcgcaaggccgatccctgtattgcctgccgtagcttctataatcactccgccgggtttcactttgcctgaatcgagcgcgtcacgaatcagcatatctcccagtctgtctttgatgcttccccctggattcatcatttcaagcttggcatacaccgccactccttctggaacatcaaagttcttcaagcggagaagcggtgtattcccaatcagctcggtaatgtccgtaatcactgtcatatatgtcctcctccttattagagggtgtttttagaaaaaacggaggagaacattctccccgttttaatgaattcgtttgatcacctttaacacaagctctgttgaatggacagccgcctgctctaaaaattggtcaaatgaaacatgtgattcttttcctgcaatatcagataacgctctgatgacgacaaacggcgttttaaattgatggcacacttgagccactgccgcagcctccatttcaaccgcatacaaatcagaaaatctcgtacgcacctcttcaacccgcttcggatcgttcatgaaagaatcgcctgttgcaatcgttccttttgcaacctgaatgccgtcgagttcagataccgcttcttcagtgatgctgatcagcttttcatccgccgcataagcagccggaagacccggcacttggccgtattcatagtcaaaagccgttacgtctacatcatggtggcgaacgtcagtggaaatgacgacatctcctacattcaatgtatgatgaaatccgccggctgagcctgtgttaataacataatcaggcttgtaacggtcaagcagaagcgtcgtgctgatagcagcatttacttttccaattcctgattttaaaagaaccacttcagttccttcatattcgcctgttgtaaattcacagtgtgcgatcgtttctgtttttgcattttcaagtttgtttcttaagatggtaacttcctcttccattgctccgatgactgctagtctcatctattcacattcccttcactttaccgtttgatcgcctccattatccacacgaagtcgttttgctgagtgaatcggactgcaaaaccttcagctgtaaacatttctttcaacgcatccaatgtaggataatgctctgtctctaaatcatttgcaagctgataaaagccttgagaacgggctttatcgatagcctgttgatacgcttgcgcatcttcaaagacggtatcggcaaacactattttatcatgcaagtgaaggtatttgccatattgctttatggcagcccgcttttcttcgtcagtcaaatgatgaaaagcatatgaactgacaattgtatcagcctgaaatggcggctcagggaatgtcaggaagtctccatcaacgatttccgacctgcctgaaagcttgtcagaagccagtttacgcattgctggagaaggttcgattccaaatacagttttgcctgcatcgagcagcttagccgtcaaattccctgtccccgggccaaattctaacacatgcgttccagatttgctgacgatggcatcaaggatatgatcatagcctctgaacgcttctttatactgaatatctaaaccttgtactgtttgatcataagttgctgcccaatcttcaaagagagggataaattcacgtcccatatttgtcacactccatatttaataattcctataagcatactatgaattaatgatggaacagttcctataataccacatcttctgaaaagcaggtactaaaacactttgtgtattttatgccatctcatattgcgcattgaccgcaaaaaagcttatacttcaaatgacttgtgaaagctggagggtcaagatatgaattttcaattagatctgattaaagacaaagtggaattttttgaagcggcttcattgcaggagcttgaaaagaaaatcaatacacaaattgaaaacaataaagccatcatgctccgggtgaaatctgtttcacaccaaactgctgtggcagaaggaagaatattgtacagcgcggtggttcatttcgcagctgaagcctaaaacaaaagcagccggttctaacccggctgcttttgtttattttagcttttctacttttgtcggcttccagccttttttatcaacccatgtaatcgtgacttgatatttattcccagtcgccttgtccaaaatcttgcctttagcatcctgagggctgccgttatttccaagccagagcaccgtcatgttatctgttgagacaccagttgcgtatgaaatggctttcagcatctcagcccagtcttgtgagcttgaatcataagtagcggcatgctcgccagcctgctcagttccgactgctttccagtcaggattttcatacgttttttccacatcgctcgatgagccgccttctgttacttttgcatctttaagcccgtcaccggctgaatctgagcttgaatctgaatcagagtcatcttttttagaagaagaatcatcttttttggaatcagagtcagaagacttctcagaatccttttcgctgtcagatgtatctttcttgctgtcttttatatcctcatccgatttcttttcagtctttcctgaagccggagattcctgtttttgcgccgtttcagaatccttgctgacatctttgctagaaggactgttaatgaagagattcgctgctactacgacaattagtatggatacgattgcgattaaaatgttaagcactaaattggcttttctgcgtttatcacgattttcataacgagattgattattgctcaataattctgcactcctttatccctcttggctcagcatatattttaacatgtgctgagaagttgttctatttctgattgatttcaatttcgtgtacttttttaacaatatcataaaacaccgaatttgtcagagccttatctcccggtgtatccatgtgtaaaacaaccagagcgtatttcggcttatccgcgggaaaatatccggcaaaccatttttcatagagcgtttccctctcttttgaaagcttgcctgtttgggctgtgcccgacttccctgctacagtatacggaagatcttgaaaccttctgcccgttccggaaggagattctaccacccgccgcagtattttttgaagctgctgtgacgtatatttgtctatcgtttcccctttgagcttctgatctttaaacgtaacgagcgttgtgccgttcttatactcaatttgttcggcaattttcacctgccgtttttctccgccgcgggcgattgtcgccatcatattggctacctccagcggcgttacctttacgtttttctgcccgattgctgtttgcgcaatggcttttttgactgatttgtctttttcatccccccaaatcacgccgcttttttcgttatacagctggcggaaatcggtttcgtggtacagttttccctcccagcctgcccgatcagtgagagccagcttctcggacatatcttcaataaccgagctgtcttttttcattaattgttctgcaagactcgtaaatgtgtaattacagctttgggcaaaactttcatcaaaagacaaggttcctttgtcgtcccccggttccccgtacaggtttaaattgcaattaaaggtttgactaggcttcaccatattattttcgattgcagctgcggcaatgactgttttaaaaactgatccgggatagattggcgtcagcatataattttgaagtgtgttttgccgggacacatctgcatctggtttgcttacaatccccagaacactgctattttcgatgtccagcagcacagctcctccctttttcagcccctgttcatccaatacctcctccatcgctttttgaatgctttgatcgatcgttgttttgacctggagcggataaaatgtattggcttcagctgtatatttgacgtccatgccaaacaaagggtttccttttccgtccacatgatataaaagctttgtgtcttgttccggaagcaaaaactcgtcaaatgtccgttctaaaccggttgttccgatttctgttgtaatcggaaggctctccttgtcaggatatttcttgcgaagcagcgccggatcttggttcgtgctccctatcgtatgtgaagcaaggctgggcttgtcttcattctccatatatacgccgtaaatgccgggatatttcaaagaattgatttttgtgatagattgttttgaaagtgttttgattttcttttgctgcaaaatgaccggtttttttgcctgacctagtgtctggcgcaaatcatcttcagacatgccgaggatgtccgcaacttttttgatcggccaatcctgcgtcagcagaaaagggaacaaaacaaccgcaggctcgctttgtcctgtcagcgcccgcccgtttcgatctaaaaaagagcctcttccatctgaaatgagcacttcctccgtccgctgtttcacactttcttgaatcaaattaattttctttttagaaaatgattctgtgaaaaacagctggatttctgcaagtctcagcagaagcagaaaaaatacaatcaaaaaagcgatgactgccagcttcattcgtttcgatatcttcataaaaaaaacacctcacccacattgtggacgaggtgtttcgctgctaaacagatattatgaaattttcacaattttcacgagcatttctccgcccggtgtttgtactgtgacttcttcatctacttttttgcccaagaggctttttgcgatcggtgaatcgtttgagattttcccttcaaacgggtcagcttccgcgcttccgacgatcgtatatgattcttcatcaccgtcaggcagttcgacgaaagtgacggttttacccaaaccgacaacgttagagccgccgtcatcttcaatgattttcgcattgcgaatcatattttcaagagtcgtcacgcggccctctacaaatgcctgctcttctttcgctgaatcgtattcagagttctcggaaaggtctccgaagcttctcgcaattttgattcgctctactacttcttttcgtttaaccgttttcaaatattctaattcttgttcaagtttttgttttccttctgcagtcataggaaaaactttctcttgtgccatgtcccttcactccttctggttgtccctcaacatcttcgattatgtatgagagcataaactaaaaaatacaagaatgagaacacagggcagtcctcgttcttctctcccatataggtactgtttatcttaaactgaatcgtgtcgttctgcaaatatttcgcgtttataaacagggaaagaagggaattcgcacattcccttcctgcctatacataatatggtcagagttatttatgtctatgctatggtattacaaaatcgcgttttgttcaagaatggtttgaatttttgtgaccatcagatcaattgcgacgtgattctgaccgccttccgggataataatatcagcgtatcgtttcgtcggctcgacgaattggttatgcatcggacggaccactgacacatattgttcaatgacagaatcaatagagcgtccgcgctcattaatatctctcataatccgtctgatgatacgcaagtcagcgtccgtatcaacataaagcttgatatccatcagatcacgaagccttttgtcttcaagaacaagaatgccttcaaggataataacatcctttggctctacgtgaaccgtttcttctgaacgtgtgtgaagcttatagtcataaatcggcttttcaatcgggcggtaattcaatagatcttgaatatgctcgattaaatagtcattatcaaacgcaagcggatgatcatagtttgtgttcagcctttcttcaaacggaagatggctttggtctttataataaaggtcctgctggatcattaaaattgagtgtcctttaaactgttcataaatggaccgtgtgacactcgtttttcctgaaccggaacctcctgcgattccaatgactactggattcttacccatgggctgttacttcccctttctcatcatgttgctcggataaatctttttgtctagtttgaatttgacaatttgcaggggatggcgggcagcatctagctcatttccgtcttcgtcccaaatggtttcaatcgtatgtgtaaagttttcgatttctggaccgaaaaattccacttcgtcgccttttttgaagaaattgcgctgctgaagcgtgaccatttgtgtatcttcatcataattcagcactaagccgacaaaatcatatgtcgttttcttggcgtgttcgccgaacatttgctcttcatagcctggcgttccttcaaagaaagctgtcgcagtgtccctgttggcgcacttatcaagctcttcaagccattctttttgaatcacaaagttttctggatcagcgcaataagcatcgattactttgcggtatacgctgacaacagttgctacatagtgaatggatttcatgcggccttcaatctttaagctgtcgatccccatttcaatcatttttggaatggattcaatcagcttcaaatctttcgggctcatcgcaaatggtgcatcttcttcaccatacaaagcaacggcgttggcaccgtctgtttggtagagatcataatcccagcggcatgactggcagcagcctccgcggttggaatcccgcgctgtcatgtgattgctcagcacgcagcggccggaatatgcaatacacattgcgccatgaatgaaggattcgatttcgatatctaccttttctttcatttctctgatttcaagagcgctagtttcacgtgccagcacgacgcggtcgagaccttcttccttccagaactggacagccttccagtttgaaagagactgctgtgtgctcaagtgaacctcaacattcggcgccactctgcggcatgtttcaataataagcggatctgccacaataataccggcaacgttggcgtctccaagcgcttttaaatagtcttcaagcccgtccatgttttcattatgagcgaaaatattcgttgttacgtagatcttcgcgccatatttctttgcgaattcaacgccttctgcaatttcttcgatcgtaaagttatcggcattcgagcgaagcccgtattcctgtcccccgataaagaccgcgtccgctccgtaatgaacagcgattttcagcttttcaagattacccgcaggtgcgagaagctccggctttttcgtaatcacacgctttccattaacgattgtggatattttatcatttacggcagtcatagcttaacctccttttgattaataaaccgtttccttgaagaagaatccggtatcaatttttctgtttactggctggatgctttcaatgcgttcgatccagtcttcttttttcgcttcgtattcgtcacggttttccacgcacaaatcaattgcttctctgtacattttggtgacttctattaggtattcaggcattttcaaaacaccatcgattttgaaagaatcaattccggcatctatcaattcctcgagctcatcaatgatgcacacatcgttcgggctcatgatgtgagtgccgttttcatcttcgaaaatcggatatttattatcgcgttctttatcgtgtaaaaacatgcctgattcttttttctttctttcaatgtccatgactttgccctgatattcaaaatagtttccaatcaaagaacgcttcgattggaacatgcacgtcattccatgcacctggatttcaatttcgacttcagcattttctttaatctcaacaatgctgtccatgtttaattctctggcaagcacagaacgcgccgcacccttgcgtccccagtagttgcatgtataatagttggtgcctgtcgtttctgtgctccaatgaagcttcagatcaggcgcagattcacgggcagccatcagcacggcaggatcgccgaataccgctgcatcgacaccggcttctgctaagaaagccagatattcgccaagctcacccactttatcattatggaaaattgcatttacagcaacgtatacttttgccccttctttgtgagcaatctctacggcttttgttacatcttcacgagaaaattctccggctaatctcaagccgtatctctgttccccaactaaaaacgcagttgccccagcctgtatgagcggcaaaatgtccgctgtactcgtcggcgtcactaagagctctggttttttcatgacgttcacctcttctttttactaatcgcaagtccgtccccgacaggaataatcgcagtttgataatccggatgattcatcagccaatgattatattcatcaattttggctacaagcctgcgccttctcttcggttctattttgctgtaatcctctgccaccagacctttaaacagcacgttgtctgttataatcaccccgtccggtgaaagcatcggttcatataaatgaaaaaagttttgatactgaccttttgcagcgtcaataaaaatgacatcgtaaggcgcggttacatgaacggcgtcggctaattcaagcgcatctccgtaaaaaacatgaatccggtcatcaagctgaaattccttgatattgtttaccgcttcttcatgccgtttctcattgcgttcaattgtatatatttcagcagacggcagttccagagccattcgaatggctgaataaccaatggccgttccgatttctagtatttttttcggctgtttcacagacaaaatttgaagcagcacctccatgcccgctttttccataatcgggacatgatgttcttctgcatatgcttcaagtctcttcacgttatccggccgaggctttaataatgcttctatatagtcatttatttgttcataccggtcagtcactacaaacagcctcccgttctaaaaaggagtgccccagtcttatgcgcaggacactctctgaatacatcatgatacatcggtaaacaacccgatatattttatcataaaaccttgcggaaagcgaacaaaaggagagctttttgctctccttttatttctcattttttgaggaaatgtatttttcttttgctttattatgctcttttagcgtttttgtaaatacgacctcaccatttgatttggccaagaaatacagatagtccgttttatccggatgcagcgctgcttcccatgatgacatgccggcattggcaatcggccctggcgtcagccctgtgtttttatacgtattgtatggtgaatcgatttccagatccttataaagaacccgatctttatgcttgcctgccgcgtacaggacggtcggatctgtttggagcggcattttctttttcaggcggttataaaagacgctcgcaattttatggcggtcggctttttcagtcgcttcttcttctatcaaagaagccattgtcagcagcttatgcacagaaactttgtttttcttcatttctgatttatatgtttccacataagaatttgtctgcttaatcattgccttgataatgtcttcaagtgatgtgtccggatcgttaaaagggtatgtagccgggaataggtacccttcaagcgggtgcttaatgtttttattgaaaacatcatttgtcacagtgtccgggaattctttcttcagctgattgataaatgtttcatcgtccagcttcgctatgacttgttttttagagtattttgtttcatcagcaatagcagccgcgatttgggtcagctgtgctccctcagtcactgtgatttgaaaagcgtaacctgtagccccgcttgtcagcttctgaataatggcatctaaatccatacctttattcagatggtagaatccggcctgaaacccggaagcacctttatatttcacatagtactgaaacgccttctcgctttttatgacatcatttttctttaatatcgatgcgatggctgaaacagacgaaccgctcggaatgttaatattaactgtcgttttactgtctttttcaacaggttcaagcaatgatttcccatataaaaatgccccgccaatgatgagaaacagcacaacaatggaagacagtatgattctttttttattaaaaaacgattttttttgctgattgatatacattaggtctcctcccatcagctcttatactacatgattcattgtatttcggcaatttattacaaaaagaggcctgcataaagcagaaaaaagccggagcagtatagctccggctttggtttggcgcgatgttttactcttcgtcttcgtccgctaagaatgtgtttagtgtttcttcgatcatatcccattcttcgtcagtttcaatcgggaatagctcaccgttttcaccgtcttcgtttggcgtgaagctggaagcaagaatttctacttcttcgtcatcttttgattcgattggatagtacaagacataagatttgccaaactcttcattttcaaatgtaaacagcacttcacaaagctgttcatttccttgatcgtcaacaattgtaatatttttttcgccgtgttccattttcttcacctctggctttaatttaagctgtcaagatatccttgtaaaatcataacagccgccattttatcaatgactttttttcgtttttgcctgctgacgtcagctgcaatcagcattttttcagccgccattgtggtaagacgctcgtcccacagcacaacaggaacattgtacgttgtttcaagcactttcgcaaatgtttggctggcttcgcctctcgggccgactgttccgttcatgttcttaggaaagccgagcacgattttatctatagtatagtcctttatcagttcagataaacgggataaaccataatcgccttctgcttcatttatctttatggtctcaatgccttgagcagtccagcccatttcatcgctcagagctacaccgagtgttttggttcctaaatcgagtcctaatattctcattctttatttacgcctctttatgctgttctaaataagactttaccaattcctcgattaattcgtctctttcaagtttgcgaattaaattgcgagcgtcacgatgcctaggaatataagcgggatcacctgacagcaagtatccgacaatctggttgattggattgtagcccttttcctgaagcgcgtcatacactgtaatcagcacctcatttacgttagtctcagcagaatcatcggagaaattaaatttcatcgttttatcaaacgagctcaccgttttgcacctctttcccaaattcgcaggcaaagttcagcctggggtcctaatcttaccatcattctacactacatgggcgaattataaaacggatttcacccaatcttctacagaagccaaagcttcttctaatttttccggctgtttaccgcctgcctgcgccatgtccggacggcctccgccgcctccgccgcaaacttccgcagcttgtttaaccagcatgccggcgtgaagtcctttctcaatgaggtcctttgtgactccggcagagatattaactttatcgttttgtaccgcaccaagcacgatcaccgcagagccaagctttgctttgagttcatcgaccatagtgcggagatgattcatgtcttttgcatttacttttgccgcaagcacgtttacgccgtcaacttcttttactttcgacaggattgctcctgcttccacgttgcctagttttgcaagaagagattcattttctctttgtgcatccttcagttcagcctgcagagccgcgacccgtttcggcacttctttgatatttgttttcagctcgtcagcggtctgcttcaatacagaaatctggctgttcatttcgacgtaagcgccttgtcccgttacagcttcaatccgtcttgtgcctgctccgattccggattcagaaacgattttaaacaagccgatttctgctgtatttctgacgtggcagccgccgcacagctctaagctgtaatctccaacttgaacgacacggacaatatcgccatatttttcgccgaacagtgccatcgcacccatttcttttgcttcagcgatcggtttcaaatcaatgctgaccgggatgctcgcccagatcttttcgtttacgattctttcaatttgttcgagctcttcttttgtcacttggccaaagtgcgagaagtcaaaacgaaggcggttttccgttacaagagagcccgcctgattgacatgagttccaagaacatcttttagagcctgatgcaataaatgcgttgccgtgtggtttttaatgacgccgcttctcatatggtcttcaacttcagccgtaacatgcaggcctttttgaacagtaccgctctccacaacaccttcatgcacatgctggccgttcggcgctttttgaacatctttaattcttacaactgcctgctcgcttcggagatagcctttgtcgccgatttggccgccgctttctgcatagaacggtgtttcatcaagaatgatttgaacgctttctccttcatgagcctcttcgattaattggccgtcctgaagaagcacaatgatattggcatcagctttggtttgagagtagccgacaaatgtgctttcaactgtcacgtcgcgcagtgcgccgccctgcacctgcatgctgccgacatcctggcgggcgtttcttgcccgttcacgctgctggttcatttcctcctcaaagccctcatggtcaaccgtcatgttctcgtcttctgcgtattcttcagtcaattcaaccgggaatccatacgtatcatacagtttaaacacatcagcacctgagataacgctgctgcccttgtctttttcttttttgatcatttctgacaggatcgcaagcccttcattaagggtctcatggaagcgttcttcctcggttttaatgacttttgcgatgaaatccgctttctctttcacttcaggatagaaatcagccatgatttctgcgacaaccggcactaaatcaaacatgaacggacgatggatgttgatcgttttggcataacgcacggcacggcgtaataagcgtcttaatacatagccgcggccttcatttgacggcagcgcaccgtcactgacagcaaaggcaaccgttctgatatggtcagcaatcactttaaacgcagtgtctttcacattgtctttgccatatgtttcaccagaaatcgattctgttgctttaatgatcggaacaaacaaatcggtgtcaaagtttgtcggaacattctggatgacagacaccattctttcaagacccatgcctgtatcaatatttttctttggaagcggtgtgtacgtgccgtcagggttatggttgaactctgagaacacaaggttccatacttccaggtaacggtcgttttccccgcctgggtaaagctccggatcttctggatcattaccgtatgcttcaccgcggtcgtaaaagatttccgtattcggtccgctcggcccttcaccgatatcccagaagttcccttccagacggataattctttcttcaggaataccgatttttttcgcccaaaactcatatgcctcttcatcttcaggatgaaccgtaacagagagaagctctttgtcgaagccaatccacttgtcgctcgttaaaaactcccaagcccatgtaatggcttcttctttgaaataatcgccgatggaaaagtttccgagcatttcaaagaaagtgtgatggcgcgcagttttacctacattttctatatcgtttgttctgatcgctttttgagcgtttacgattcttggattttccggcacgacacggccgtcaaaatattttttcagcgtcgcaacaccgctgttgatccaaagcagtgaaggatcctcatgaggcactaatgacgcgcttggctctaccgcatgtcctttttctttaaagaaatccaaaaacatttgacgcacttccgcagaagttaagtgtttcattgtatttcctcctctataaaaatcgaaattctcttcagtgacagcaaaaaagccctccccctatgcaaaccaacgtttacacagggacgagagctgtctcgcggtaccaccctgattacgggcattcatgcgcccgtcacctttaaccctgtaacgcaggataagcggcagtgattaactgcactcaggattagcttcctccgatcttctgataaagctcctttcagcttatggagcttctctctttaacagggcttcggcgtactcagatccgtcactcgagattcgtatgtattctacgagaaattatagacaagcggcacgccgatgtcaatgctccgtcctcatccgcaaaaaatggatcatcattacttttaaaacagccgtcgcaggaacagccagaatcatcccgacgatacccgcaagctcccctccggcaaggagtgcaagcatgataacgaccggatgcattttaaggcttctgccgacaatgaacggactgaggatatttccttccataaactgcagaataaacaccgtaatcaccacaacaagaaccgccttgactgagatcgtcatcgcaattaacaacgcaggaacagctccgatgaaagggccaaaatacgggatgacattcgttaccccagagataaggccaagtatcagcggatacggaagcccaaatacccagaacgaaatgcctgcaatcacgccaagaatcaagcagaccaaaagctggccgcggatataatcgccaagcgaatcatccacatcccgcaaaaaggcgctgccccgctttctccacgacttcggagtcaagtaccatactgtctttttcattaactcaatgtccttcaccatataaaacacgagaaaagggattgttgcagcaattaagaagtaatcaagcacattgcggatcccgctgatcgcaccctcgatcgttcccgcaaaaaacgcctccgtctggcggatcattttatctatacggtgatgcataccatcaggccagtcatccgtatggttatgcacatgaagaagaagcccgttatacgtttcggcaaacatgggtatattttctgacaaatccgtcagctgcacgattaaaacaggcacccctttatacaacgcccagccaatcccgccaaaaaaaagaacataaatgaccaagatgctcaaagtcctaggcaatcctttgccatgcagccattctgtgaccggaagcaataaataagatataaaaatagaaatgatcaagggaataaagatcgtttttatgacgagccaaaagggtgaccataacatatcaagcataaaaaagacatagactgttaacagaaccagcaaacaaatagccacccacaacaaaagctgcaccggtttttggagcatctgctttcacctcacctatatcttttgaggtttacaaggaattattctttatgtttctttagtcagtcagaagtcatggacattttttcacttttaattttcagaaaagtttgatcatttactttttggtcaaattttctgataggaggattgcgatgatcacatttcaaaatgtaaacaagcattacggagattttcacgtgttaaaacaaattaatcttcaaatcgaaaaaggtgaagtcgttgttatcatcggcccatccggttccggtaaaagcacattgctcagatgcatcaacagacttgagtcgatcaatgagggagtgcttacagtaaacggcaccgccattaacgacagaaaaactgatatcaatcaagtgcggcaaaatatcgggatggtgtttcagcactttcatttatatccgcataaaacagtgctgcagaacatcatgctggctccggtaaaagtgcttagacaatcacctgaacaagcaaaggaaacggcgcggtactatcttgaaaaagtcggcatcccagacaaggctgacgcctatccttcccagctttccggcgggcagcagcagcgtgttgccatcgcaagaggactggcgatgaagccggaggtcatgctgtttgacgagccgacatcagcacttgatcctgaaatgatcggtgaggtgctagatgtcatgaaaacactcgccaaagaaggcatgacaatggttgtcgtgacacacgaaatggggtttgccaaagaagttgccgaccggattgtcttcattgacgaaggaaaaattttagaagaagcagtgccggctgaattttacgcgaacccgaaggaagaacgggcccgcttattcttaagccgtattttaaatcattaaaacagaaatggggagcttgtatgaaaaagattttttctttagcattgatttctttattcgctgtcatcttgcttgccgcttgcggcagcaagggatcaaacggagaagcctcaaaggagagcaaaaaagatacgctagccgccattaaagacaatgacaaaattgtcttcggcgtaaaaacggacactcgactgttcggtcttaaaaatccaagctcaggtgagattgagggttttgatattgatattgctaaacaaatcgctaaagacattttaggtgatgagaaaaaagctcaatttaaagaggtcacctcaaaaacaaggattcctatgctgcaaaacggggatatcgacgccattgtcgccacaatgacgatcactgaagaacgaaaaaaggaagttgacttttctgatgtctatttcgaggccgggcaatcgcttctcgtgaaaaaaggcagcaaaatcaagagtgtcgagaatcttggcaaaggctcaaaagttcttgcagtaaaaggctccacctcctctcaaaacattcgtgaaaaggcgcctgaagcatctgttttagaatttgaaaactacgcagaagcctttacagcccttaaatcggggcaaggcgatgccctcaccacagataatgcgattttatatggaatggctgatgaaaataaaaattatcaattaacaggaaagccttttacagatgagccttacgggatcgccgtgaaaaaagggcaatctgctctcgcgaaagaaatcaacgcttcacttaaaaagatgaagtcggatggcagatacgatgaaatttataaaaaatggatcaaagaagacccagctgaataacaaccatcccgggatgagcaggcgatgctcatcccaatttgataaggagtgaataggcagatgaatgtgtcaattcttttcgataacttcagcatgtatatggacggtttttaccataccttgctcgcaagtgttatcgcgctggccggcagttttgtcctcggcgttgctgtagcggttatgagaataacagtctttaagccgctgcaatggctcgggaccgcatatgtagaattcatccgcaacatccctcttcttttaattacctttgttttctatttcggacttccaaacgcaggcctgaggcttgacggttttcaagcgggaacggttgctctcaccatttatacctctgcgtttatcgctgaagccatcagagcaggcatccagtctgtttcaaaagggcagatggaagcggcacgctcgtcaggctttacctacagccaagccatgctccatatcattttgccgcaggcaatcaaaatcgtcattccgcctttaggcaatcaatttttaaacttagtcaaaaactcttcgattcttggggttgtggccggattggatcttatgtaccaagccgatttagtttcgtcgagcacactcgttgtatttgatgtttatatttttgtggcgcttttttacttagtgctgacgattccgcttagcatcggtgttaactatctggaaaaacggctggaaaaaagctattgataaggagtgagttacattggatttcatcggtgcttattcacaggagcatttagcgtttttatgggatggctttctcgtcaccttgtacgttgctttcatctccatcattctgagctttttcttcggtttaatcgcaggcaccctgcgttatgcgaaagttcccgttctttctcaattgattgcagttctcgttgaaacgatcagaaacctccccttgctgttaattattttctttacgttttttgcccttccggaaattgggattaagcttgaaattacagctgctgcaattacagcactaacgatttttgaatccgctatgctatctgaaattatccgaagcggactgaaatcaattgacaaaggacaaattgaagcggcgcgctcctccgggctgagctatacacagaccctgttctttatcgttatgccgcaagcgcttcgccgcatggttccgcccatcgtaagccagtttatttctttattaaaagatacatcgctcgctgttgtgatcgccctgcctgaactgattcacaacgcgcaaattattaacggccaaagcgctgacggcagttattttttcccgatctttttacttgcggcccttatgtatttcgcagtcaactacagcctttcactcgcagcaagacgcctcgaggtccggcaaacatagaaaaggatactctttggagagtatcctttttgcattaaaacattttcgtaattcttcttctcatccgcttcatgcttcgattattcagcatgtcagattgagtcgccattcggtacacgagagctccggctcccattgccaaaagagaagtcatcgtccgattcatcctgcgcatctcctttcatgattaaaaattgatgctgcgttcatcctcagaaaacaaatcatccaagctgcttaacgttccgtcttcttccacctgatgagttgcaatcttccctttcgccactgtcagttcaataaaacagccccagcaataatattggttcacgccgattttgccgatatccttacttttgcaattcgggcatataagcatacctcacacctctatccgttcagaacgatctcgtctttccgcacctcgacaagcgaatccgctctttggatctggcgcttgcttcccgcaaggtcagaaaagaaaccgtccgagagttcatatgctacgattatgcccctgtccaaacaaaagtatacatcttccagcatccccaatatatcgccctcttgcgatttcacaagcttcatcttcatctgctcgtatgtgaagcatgatttcggaagaggcaaaagctgttctgaactgaccgaagccaatatgcggtcatcaagaatggaagagatatcacacgcccgtaatagcgcatgatgatgatgcaaaaagcgtttttgtgcaagaataaacccaagacaatctcctttcagagaaaaacaaatatcggaaattgccccgagataacaagaagttcgttctgagtatactgggaatccttctacttcatggcatgttctcaaagtgtgatcaaccaccttttgttgaacaggcttaggttttgctttgcgccttagactcatacgatgaaatcaattccactgcaaatgaaaaaaactcccgcttgcacgggagcattttattgctgttcttctttcataaaatcgaatggtgtaatgccttccatgccaatgttggcgtcgtgtacgctgaacgggagctctttttggagagcctcaagctcggcatccatttcctcaacctgtacggacagcctgttttttaaggaggtctgtctgacagttgcatcattatttttcacgccccactccagcgcctcctcttccccgcataaaatgagaaatttcttcgctcttgtaatcgcggtataaagaaggtttcttctgagcattctataatagcctttcacaacaggcaaaaccacaatcggaaattcacttccctgcgatttatgaatagaacagcaatacgcatgggtaaattgattaaaatcttttttcgtaaatgtcatttcattgccgtcaaaagaaacgacggccatgtcttctttttctgtattttcctttgcataaaatatcgacgtgatttcgccaatatctccgttgaacacattgttttccggctgattgacaagctgcaaaattttatctccggttctgtagacaacatccccgaacttcaattctctccgtttttctttaggaggatttaaaatgtcctgcagcatcacattcaattcattaatgccggcttttcctctgtacatcggagcgaggacctgaatgtcctttgctgtatagccttttttcaatgcattggcgacaaccttctcaactacttctttgatttgcgacccgccgcagcgaataaaggaacggtcctttgtcggggcagtcaaattgttcggcagcaatccatttttcatctggtgggcaagctcgacgattgatgacccttctgcctggcgatagatgtctgtcagtctcacagtcggaatcacctgggatgccagcaggtctctgagcacttgtcccggaccgacggaaggcagctggtcttcgtctccgacaatgatgatttgtatatgatcagggatcgccttgaacaaatgattcgccagccatatatcaagcatactggcttcatcgataattaacagcttcccttcgatcggctgatcctctgtatgagtaaagccttcagcaccgttccagccaagcagcctgtgtatcgtaactgcaggaagtcccgttgattcactcatccgttttgctgctctccctgtcggagcggccaaaacaatcggaaaagcttcatcctttttataagctgacggatctagtgacacaccgtgaagctctccgtagagctcgacaatccctctgattaccgtcgttttccctgttcccggaccgcctgttaaaagaagcatcggcgaggaaagggctttttgaatcgcttccttctggctgggggcatactgaacgttcatccgttcttccagttctcccaacgcgagcaaaaactctgattcgggaaactggttctcatattcggtttggctagcgatatgtttcacacgctttgcaacgttttgttctgcgtaaaacagcgaaggaaaataacagcggccatcttctatgacaatgtctttattttctccaagggcaataatcgcgttagcggcatccatttctgtgatgcgctgcccttcccttgctgactggtttaacagagattgggtgtcaatgatcagctgttccgtttctatgtacgtgtgcccctctgacagacaagtcgtttcaagcgtgtacaaaatagcagcttttacccgctcaggatggttacccgaaagacccattctgctgcccagctcatccgctttcccaaacccgatgccttctacatccttcacaagctgataaggattttcctgaatcttttcaagcgtctcagattcataggcttgatagattttcatagacagctgcgggccaaaaccaaactgattcaaggaaatcatgatttgctccagtccctgatgccgctgcaatgcgccagccagcgtgtcggctttcttttttgagagtctgggaacatcataaagcactgaagcgtcagccaatattttattaatggcgctgtcgcccagctttttcacaatttcttcagctgtttttttgccgatcccctcgaataaatcactcgataaatattgaatgatgccttccttagtcgttggaatctcctttttgaaatgctccgcctgaaattggagcccgaattttggatgagttacgatctttccgtaaaacgtgtaggtctcttcttcttgaagcgcagggaagtagcccgtcacggatacggctttatcttcaatggcttcggaggtctctgtgactttcactttcagaaccgtatataaattggtgtcattatgatagatgactgtgttgactgtcccttttaaatagggctcttcctccagtttaagctgatccggatgctgctgcacgagctgtccctcctcctgtgcctgttatgatggatcaatcagttttttagcatgaagcgcaagcatatgatctggctggatatcgattgccttgtccagcatttccagcgctttttctcggttttctttataagcataagcgacaccggcattataaaatgcatctgcatgccccgggtcttgctctgtcacagctgagaattggctgagcgcttcgtccagcatgccctcgttggctaagcacatcccgaattgaaagcgcgcttccgtatcgttttcattcagttcgactgctctttgtaaatatggcagtgcaagcttaggctgttcgagcttgacaagcaccgttccgagcatgtaaaacaggtcgccgttttccatccccgcacgaagcgctttttcaaacatgtctttggcttctttgtacatttcttttacaacatagacatttcctgctccataataagcagtggctgcgctactgtctaattcaagcgctttatcataaaacgcaagcgcacgttccagctcgtttacggatgaaagaaggttggcaaaattgatatacggaatcgcgtcttctttattttcttcaatcgcttttgtaaatgcctctgccgctttctcgtaatcgccttcctgcatcgcctctataccgagttgattataatccaccgatcatcttcctttcattaaaaaaccccaactcagtgttgaggtttttcatcttttatacgtaccacaattttgttccgtctttgtacacatcatcaattgtcccgccgccaaggcattcttcgccgtcatagaagacaacggcttgtcccggcgttacagcgcggacttgttcatcaaagatgacttccgcttcaccctcgccagtcatgcgcaccgttactttatgatcttcttggcggtaacggaatttagccgtgcaggaaatctcttcgcccttcatgatatccgaacgtacccagctgatatttgttgctgtgattttgtcagaatataaaagcgggttatggaacccttgatccacgtagaggatgttcttttcaagatctttgcctaccgcaaaccacggctcgccgcttccgccgatgccaaggccgtgacgctgtccgatcgtatagtacatcaacccgtcgtggcggccttttacttcgccgtccatcgtcatcatatcgcccggctgtgcagggagatattggctgagaaacgttttgaagttgcgttcgccgataaagcagatgcctgtactgtcttttttcgtcgccgttgcaagttctgcttctttggcgatttcacgcacacggcttttttgaagttcgccgatcgggaacatgactttgctcagcgtatcttctgtcagctgattcaggaagtacgtttgatccttgttttcatcaatgccgcgcagcattctgacttttccgccgcttctgtctactcttgcatagtggccagtcgctaaatagtcggcgccaagtgacaatgcatgctccaaaaaggctttgaatttaatttctttgttgcacaatacatccgggtttggtgttctgcctgctttatattcatcaaggaagtattgaaataccttctcataatattgcttttcaaagtttacggcataatacggaattccgatttggttgcagacgcggatcacatcttcataatcctctgtcgccgtgcaaaaaccgttttcgtccgtatcatcccagtttttcataaagattccgattacatcatagccctgttcttttaacagcagggccgccacagatgagtctactccgccggacatgccgacaacgactcttgtatcctccggccgtttttccatttcattcactccaattactacgccgccttattgtgtcagccgtttgacaacgtcggccacatgtttggcagcagttttcacttgctcagccgtattgccgaggccgaagctgattcgaatagaggacgtcagccggtcactctcttcgccgaacatagcagtcagaacatgtgacggcaggactgaaccggccgtgcacgctgaaccgctggagacagcgacaccagccatatcaagattaaccagcagcgcttccactgacacaccggggaaataaagattcagaacatgcggcagactatgctctttgtccccgttgacctcgaatgccacacctgcatctctaagcgtgtcggcaaagattgctttaaacgattgatacttctcgtttttttcgtcacgttcttcacttgacagcttgatcgcttctttcagcccgacaatgcctggaacattttccgttccggcacggcgttttctttcttgctctcctccgaataaaagcggtgaaagcttcacatctttactagcatataaaaagcctgtcccttttggcccgttgagcttgtgcccggaaacagacagaaggtcaatatggctgtttttcacatcaattggcagcaacccgaatgcctgaacagcatcggtatgaaaataagctttgtgttcctttaacagctcaccgatttcttcgatcggctgcactgttccaacttcattatttccatacatcactgtcacaaggattgtatcatcacgcagtgcttctttcacctgttttgcactgactcttccattttggtcaacgtccagatacgttatgtcaaatccgtcttcctcaagtttttcacatgtgtgaagcacggcgtgatgctcaatttttgttgtgatgatatgtctgccaagatcttttcttgcaagtgcggttcccatgatcgccaagttatcagcttccgttcccccgcttgtaaaaatgatctcctgctctgccgctccgatttctgctgcgatctgcgctcttgcttcatccacccattttcgagattctctgccaaatgaatgaatactggagggattaccgaaactgccggagaagtgcggtatcattttttccagcacgcgctcatccatcggagacgttgcggcatgatctaaataaatccgttccattatgtttacacctctgatctaaatatagaacatataagcttcttgctctccgtctgtatagctggcaagatcctctaatgttgtactgtctaaaacctcttttacagcatcccggatgcgaatccagagctcacgcttggcaggctcctcatcttccagcacttcaacagggctgatcggcccctcaagcacacggataatatctcccgcagtaatggcatccggctcactgcctaatacatatccgccatatgcgcctctgatgcttttcactaaaccggcatttctgagcggcgataccagctgctccaaataatgctcggacaaattattcgtctgtgcgatgctttttaatgaagtcgggccttcaccgtgcttttttgcaagctcgatcataatggtgagcccgtatcttcccttagttgatattttcaacatgaacacctctgttatttcatgattttccacatttataatggtaatttctatatgtttcgtccgtttattatcttatagaccaactgttattataacataccttcagcgaattttcattgaggcagaaggaaaggggcctttacccttttctaatgtacggttttccgttaccctgtaattaagtaaggagagatgatagatgaagccattggcatatcggatgcgtccgacaaaaatagaggatattatcggccagcagcatctggtggctgaagataaaattattggcagaatggtccaggcaaaacatttgtcatccatgattttgtacgggccgcccggaattggaaaaacatcaatcgcaacagcaatcgccggttcaacaagtattgcttttcgaaagctgaatgctgtcattaacaataaaaaagatatggaaatcgtagctcaggaagccaagatgtccggccaagtgattttgattctggatgaagtccacaggctggataaaggaaaacaggattttctattaccctatttagaaaacggaatgatcattttgatcggagcaacgacggctaacccgtatcatgccattaatccggcgatcagaagccggacccagatttttgagcttgaaccgttaacacctgatctgattaaacaggcactggaacgtgcgctccatgatgagcatcggggccttggcacctattctgtatccattgatgatcaggcgatggagcattttgcccacggatgcggaggagatgtccgctccgctttaaatgcgcttgagcttgccgtgttgtcaacgaaggagtcagcagacggtgaaattcacattacattagaaaccgcggaagaatgcttgcagaaaaaaagcttttctcacgataaagatggtgacgcgcattatgatgtactgtccgcttttcaaaaatcgatccgcggctctgatgccaacgctgctcttcactatttggctagattaattgaagccggtgatctggagagcatcgcaagacgattgcttgttatcgcctatgaagatatcggtttagcaagcccgcaagccggtcctagagtgctgaacgctattcagaccgctgagcgagtcgggtttcctgaagcgcgaatcccactggccaacgcagttattgagctttgcctctcaccgaaatcaaactctgccattctggcaatcgatgaggccctggcagatatcagagccggaaaaattggggatgtcccgaagcatttaaaagacgcgcattataaaggagctcaggaattaggaagaggaatcgactataaatacccgcacaattacgacaacggttgggtcgaacaacaatacctccctgatcctctgaaaaataagcaatactataagccgaaacagacaggaaaattcgaatccgccttaaagcaggtgtacgataaattaatgaaaagaaaataaaacaaaaacagccttgatcatcaaggctgtttttatgcattatttatccttcacacgtttgatttcaatgtctttcaaaagatccatgacaacatgtccgcccataatcaaacctgcaactgacggcacaaaagcattagaggaaggcggcatttttgctttacggattttcgcttcgtcattccccacttcttttctgacatcttcccgaatgacaatcgggctttcatcagagaaaatcacttgaacgccttttttgataccctccttgcgtaatttcgtacggacgaccttcgcaattggatcagtgtgcgtttttgagatatcagcgatttggaagcgtgtcggatccgttttatttgcagcacccatgctggagatgagcggaatatcccgtttcagacattccttcattaaatgaattttataacaaatggtgtctgacgcatcaatgacatagtcaagatcatagtcaaaaaactgctcatacgtttcctccgtatagaacatttttaacgagattacttcacactccgggttaatgtctgcgatccgcgccttcattaaatcaactttcggctgtccgacagttgaaagcagcgcgtgaagctgacggtttacatttgtaatgtcgacatcatctttgtcgacaagcagaatgcggccgacgcctgaccgcgcgagagcttccgccgcgaacgacccgactcctccgactccaagcacagcaactgtgctgtttttcagcgtttcaaggccttcttttccgatagctaattcattgcgtgaaaactggtgtaacaagaacctcactccacattcgtattctggtttcatctataaaatggctgatccatgagcagccgtttttctgcgcacaaaaaataaagtcccaatagtgccgttgcagctttcctttgttttgaacccgctctcagcaggtgggtgccctcttttaaatcttgtaagtcctctttaccgaatgaaaagaggcatgtacgccatttaaaaatgcgggctcccaaatcaaaaaaatgttcggtcaaaactaggtgtacaactaacacatcaggactttatttaacttgtcaaaatcatatcacagacgattttgattttcaagaatccaactgcacattcagttcttaacttttttcttgatagaaagatgaagctcgtcaagctgagcgtcacttacttctccaggcgcctctgtcatcaggcagcttgcacttgccgttttcgggaatgcaatcgtatctctcaggttcgtacgtcctgcgagaagcataacgagacggtctaagccaagtgcgattccgccgtgcggaggagcgccgtattcaaatgcttccagcaggaatccgaactgttcagccgcttcttctggtgagaagccgagaagcgcaaacattttttcctgaatatccttttcaaaaatacggattgaaccgccgccaagctcatagccgtttaagacgaggtcataagcttgtgctttcatgtcttcaggcgctgtttcaatcagctcaaggtcttctcggacaggcattgtgaacggatggtgtgctgcgtaaaaacggccttcttccggatcatgctctaataacggccagtcgatgacccataagaaattaaacaatttttcgtcaatcagcccgcgctctttcccaagctttaagcgcagggcgccgagtgatgcggccacaacttcgaattgatccgctccgaacagcagcaaatcaccttcagcagcatcaagtgcttcaatcagcttagactgcttttcttcatcaaagaatttagcgatcgggcctttcactccgtctgcctcaaccttcacccaggcaagcccttttgccccgtagtttgcagcaaaagcgccaagagcgtcgatgtcttttctggagtaatcgccggcaccgccttttacgttgatggctttaaccacgccgccgtttgctacagctgatgagaacactttaaattccgtatcctttacaatgtcagacacatccgtcaaaagcatgtcaaaacgcgtatccggtttatcagaaccgtacttgttcattgcttcgtcatacgtcattcgaggaagaggaagcttaagttcctcaccttttgtttcacgcataacctttgccatcatctcctcagccaatgacataatgtcttcctggctcataaaggacatttcaatatcaatttgcgtaaactcaggctgacggtccgcacgcaagtcttcatcgcggaaacagcgggcaatttgataatatcgttcaatgcctgataccatcagaagctgtttaaatagctgcggggactgcggcagcgcatagaactcaccttcgtgcacacggctcggcaccaagtagtcacgtgcgccttcaggcgtgcttcctgttaaaatcggcgtttcaatatcaagaaacccattttcatctaaaaagctgcgaacagctttcgtcacgttatggcgcagctgcatcgtctggaacatagccggtctgcgcaaatctaagtaacggtgttttaaacgaacgtcctctgacacttcttcagcttgatcagaaatcgcaaatggaggtgtctttgcagcatttaatacgttcactccatcagcatgtatttcgatcgcgcctgttttcaaattcggattaactgttccctcttcacgcgccaccacttttccttgaatatcaagcacgtattcatttctgatgccttccgcgatagcaagcgcttcttttgacacatcagggttaaaaacgacttgaacaatgcccgtacggtcacgcaagtcaataaaaatcaatccgccgaggtctcgtcttttttggacccagcctttcagcgttacagattcgccaattgctttttcagttatatcaccgcaataatatgttcttccaaacaatgcgtttcactccttatcccttttggtttgccttcatcacatgtataaattcatcaagtgccacttcaatctgttcgcccgtctgtgcatcctttacattgattttgttttgggcaagctcatcttcacccaaaatcgcaataaatctggcctttaagcgatcagctgttttaaactggcctttcattttcttattttcataatcgatttcactggaaatgcctgcttctctcagtttgtacaccaatgaaacagaataatcctttgctttttcgccgagtgtgacgatatagcagtcgattcccttatcaacaggcagctctcttttttcagcatcaattgcggcaagcaagcgttcgatgctcatcgcaaatccgatgcccggtgcttcaggtccgccgatctgttcgacaagcccgtcgtagcgtccgccgccggcaagtgtcgtaatcgcgccaaagccctccgcattgctcataatttcaaatgcggtgtggttgtaataatccagccctctcacaaggttcggatcgatttcatacgaaatgccaagatcatttaagtattgtttcactttttcaaaataagcggctgattcttcatttaaatatgtcaaaatcgaaggtgccgatttcatcagctcatgatcacggtcttttttgcagtccaaaattctaagcgggttcgtgtgcagccgggactggcagtctgaacaaaattcttcgatgcgaggctcgaagtgtttcacgagcgcttctctgtagcttttgcggctatcttgatcgccgagactgtttatgacaagcttaacgttttctaaacctgctttttcataaatactcatcgcaagcgccattacttcagcgtcgattgcagggtctttcgaaccaatcgcttcaattccaaactgataaaactggcggtaacggcccgtctgaggacgttcataacggaacatcggcccgacataataaagctttgtcggctgtacaggatttgcgaacagcttgttttcattaaaagcgcgaaccgcagcagctgttccctccggacgaagcgtcaggcttctgcctttgcggtcctcgaaggtatacatttctttttgtacgatatccgttgattctccgacgcctctggcaaacagttctgtatgctcaaaaatcggtgtgcggatttctttatattgataagtgcggcaagtgtctctcataatttgttcaacaaactgccagcgatctgattctccaggcagaatatcctgtgttcctctcggaatgttatatcccataggtagacctccttatgtattccttataaaatatccaatgatcgttaatgatgaaaatgaaaaaaactcccgcccctactatacatgatagtagggacgagagttatacccgtggtgccaccctagttggaatacgttcatattcccgctcgatcctttaacgcaggttcacgttcactgcctaatggcgttattcacgcgttcagcaggaaacctccggagtgttgtttcgagaaagacgcaatgggatccgctttcagcctggggcgggttcctctctaatcatgcaatctgacctactcttctccattattggttcaaatctttcatcatttgctatgtactcaatttctattataataatgggattggggttctctgtcaagctttattccggttgtttttcctcagcgctgcttctttggacataagaccaaattcagatgctgtttccgtaagataaccagtcgtatcgggatctgcgtgatcgctgtaatgcagattcgcttcaccgtcgtgaaatgcacgtcccatttttggatgatatttcatgatttgcacacctttttgattgtatttacgcttagtataaacaaatcattttatttttatttaaaaatcagaaaggactttacgatattaaacaagaatgcttttttaatgatcatcagaaaggaggacacaatgaacaagaaatactttgtccttattgtatgtattattttcacctcagcgctattcccgaccttttcatccgttacagctgctcaaggagaagcggtcatcgcaacagatgaaatgaacgtcagaagcggcccagggcttagctacggcattacagcggaagtaaaaaagggagaacgctatccaattttaaaggaagatggagactgggtgcagatacagcttggttctggagaaaagggctgggtagtctcctggcttattacaaaggaagaccaggccagcacaagctcctcaggaagcagtgacactgtgacatcaacagaccccgatctgcggatgagaagcggcccgggcacttcctacgaagtcatcggcaaattcccgcaaggcagccaagcatctgtcattgataaagattcgggctggatcaagatatcctatcacagtgccaccggatgggtatcatctgaatatgtcacatcaggaggcagcagttcagcgtctgatgagagtgaccaaaccgaggattccggtgcgtcaacgacgggcacagtcggtgtttcttcgctaaatgtaagagcctccgcctcacatgacgcggcaattataacaaaacttgatcgcggaacgaaactgacggttctcaacgagaaaaatggctgggctcacattgaggtgaacgggctaaaaggctgggttgcaagccattaccttttgactagttctgttccagctgatgattcagcaaatgccggcagttcatcctccgctaaaaaagcctatatcatgtacggaggaacgaatctaagaagtgatgcgtcaacatcagcttcgatcgttgagcgcgctgccaaaggagattcatacaccattaccggttcaaagggaagctggtatgaaataaagcttgataacgggcagactgcttatgtagccaattgggtggtccaaacgtctaaaagcgcagaagaagcaggtgaaccgccagtctctgattccccgtctggaaacggctctctaaacaataaaacgattattgttgacccgggacatggaggaaaagacagcggaacgatcgggtattcggggaaattcgagaaaaacctgacgatcaaaacggcaaaactgctcgccagcaaacttagatcggctggagcggatgtatatgtgacacgccaggatgatacctttgtcagcctgcagtcacgggtctctacctctcactaccgtaacgctgacgcctttatcagcattcattatgacagctatgcggatacctctacaagaggcagtacagcatattactacagtcctgccaaagatcaggaactcgcatcagatgtccactcagaagtggtgaagcgttcttccattccagaccgcggcgtattattcggagattattatgtgctccgggaaaacagacagcccgctatgctgtacgagctgggatatgtaagccatccgcaggaagaagccattgtacatagcaattcataccaagaaaaagtaacagatgggatcgaaagcggattagagaaatacttccaataaaaaaagctgccttttggcagctttttttattttgaatccataatgagcgtgaccggtccggagtttgtaagctgaacatccatcattgctccaaacgttccggtctccactttgattcctttttcacgaagcaggtcattccatttttcataaagacctaaagctttatcaggtttggccgcgttcatgtagttcggccggcgcccttttttcgtatctccataaagcgtaaactgtgagacggataaaatctctcctcctatatctacaagagacagattcattttcccttcactgtcatcgaaaatacggagattgacaactttatcggctaaataagctgcatcatcttctgtatcatcgtgagtgatgccgaccagcaccataaggccttgtccaatttggccgacgacctcttcgtccactgtaacgcttgcttctgttactcgctgaacaactaatctcattttctaacccctttagttcatgacgcggcgcacagagtagatatctctaatctgtttaatacgctcgacgactttgtgcaagtgattgatattctgtatgaaaatcgccatatggatggttgccactttattgcgatccgatttgccagagacagatgaaatattggttttcgtttcattcactgcctggagcacctcgttcagcaatccgcggcggtcatacccaagaatctctatctcaacattgtattccttgcgcttttgaacttgtgactcatgctcccactctaccgggatcagccgctcttgggcttcattcgttttgacattcggacagtcttcgcgatggaccgaaacccctctgccttttgtgataaagccgacaatatcatcacctggcacaggattgcagcattttgataaacggacaaggaggttgtcaatgcccttgacacgaacgccagcttcccgttttcttccttgcgggtatggcttaggttccccagtgacttcctgaacgatcttttcctgttcttcctgatcgcgctgctttctctctttttctgttaggcggttcgccacctgcagagctgtgatgccgttgtaaccgaccgccgcgtacatatcctcttcatttgagaaattaaatttgtcagcaaccttttgaatattctccggcgttaaaacatccttcaattcaaaatccaagtttttaatttctttttcgaccagctcacggcctttttcgacattttcttcacgccgctgtttcttaaagaattgacggattttatgcttcgcttgggatgtttgggcaagcttcacccaatcctggctcgggccgtaggaatgcttagaggtgagaatttcaacgatatcacctgtccgaagcttatggtcaagcgtaaccatttttccgtttactttggcaccgattgttttattgccgatttcagagtgaatccggtaagaaaagtcaatcggaacagaaccggacggaagctcgattacatctccttttggcgtaaagacatacaccatgtcagagaacaaatcaattttgagcgattccataaattcttctgcatctgtcgattcattttgaaattctaaaatttcacggaaccaagaaagctttttctcaaaggttgcaccttcattggctgctttcccttctttataagcccagtgagccgcaaccccgtattccgctatttcatgcatttcaaaggtgcggatctgcacttcaagcggatcgcctttaggcccaataaccgttgtatgaagcgattgatacatattcggcttcggcattgcgatataatctttgaatctgccgggcatcggtttccagcatgtgtgaatgatgccaagcaccgcgtagcagtcctttatgctattcacaagaatacggacagccagcaaatcgtaaatttcattgaattgcttattttgcagcaccatttttcgataaatgctgtaaatatgtttcggacgtcccgagaagtcagccttgatatttacttcttcgacacgtttcttcacttcattgacaacctcatcgacataaagctcacgttctgcacgtttcttcttcatgaggttgacaattctgtaatattgctgagggttcaaataacggagcgccgtatcttccaattcccacttaatttttgaaatcccgagacgatgcgccaaaggagcaaaaatttccagcgtttcattggagattctccgctgtttttcctgaggcagatgtttcagtgtccgcatattgtgaagacgatccgccagcttgatcaatatgaccctgatatcttgagccatagcgacaaacattttgcgatgattttccgcctgctgttcctcttgagatttatatttaattttgccgagtttcgttacgccgtctacaagcattgccacttcttcggaaaatgcttctttcaggtcatcgagcgtcacatctgtatcttccacgacatcgtgcaaaaatccgcccgcgattgtggaagggtccatttcaagatcaacgagaatccccgcaacctgaatcggatgaataatatatggctcgcccgatttgcggtattgctcgcgatgagcatcttcagcgtacagatatgctttttcgacaaatgcgatatgctcatcagatagatagctgcgcgctttatctataacttgctcggcagtcaatacttgttcgttcgccatggaatcaccttttttaaaatgtaaactgtattgtagtttattatcaagaaaaaaacgaaagatgtaaagagcagaagttcaaatagccaaatattatataaaataaatgcaaaacaataggaaaaaagcaccctgacatggagtgctttttcgttatgcggttatccttagtatttcatcaatgttaagatgtcgtaatcttcgagcttatttctgccgtcaaggtaagaaagctcgattaagaaagcgataccagcaacaacgccgccaagttcttcaacaagtttgattgtcgcttcaattgtgccgcctgtcgcaagcaggtcatctgtaataagcacacgctgaccaggcttaatcgcatctttgtggatcgttaatacgtcttttccgtattccaagccataatccactttgattacttcacgaggcaacttgccttctttgcggaccggcgcaaaacctacgccaagcgcgtaagcaacgggacagccgataataaagccgcgcgcttcagggccaacgaccaaatcaatttgcttttctttcgcatattcaacaatttgatctgtggcatagcggtatacatcgcctttatccatcagtgtcgtaatatctttaaattgcacgccctctttcgggtaatccggtacaattgttacgtattgttttaaatccatctgttttatgtcctcctcgtactttcataagcctctgaatcttgtttcatcagcttattcagccattccttcagctcttcagcagaagaataattcagcttttgatccagttccatcagctgctgtttcgcctgatatgtttgtgagtctgttaagtcgcgtttctttgctccgctcacaacagacagcacaccattctctattttaacaaaaccgagatcaaaaaacacctttgtcatgaaattgattgtttcaacggaccagcctttatgttttgcaagctctgaaccgtgttttttcacgtcaaaagcgcctcttttcagcaagaacgcataataccatttaaagtggtctcttgcgggaaaagttgataaaaagtggtcctcatgattgagaaaaataaaatatatccgctcgggcgcctttccttccagcaaacgtgcgagcatgtccagcgaaggcggcggatccagtaatacaatatatgcaccatcgaggtcaaacgcctttgcttgatctttagaactgatgacgtgcacttctcggcgaaggtcttcagtttgaagtaatgttgttgagtcttctttgaaagagacaatggcccgtttagcagatggaagggcggaaactgtgtcttcccacgtccgttttccccttaaatcaaacagctgccattcagaaacagcggcatcctttatcataagctgcggcttttttcgattgttccattcgttgattgacatctcaccgacaatagaaattcttgaacccggtacgatgccttcttcaagctcgcctttattaaaaccgacgcaatcaagctgggacgactcgtttctgatcgtcattttgacatgagttttatttgcccctatcttgcggacatcttccagtactgcgttttctacgagaacgtgcggtttcgggttcagcatgccaaaaggagacagcatgttcatttctgcgatgctttcaactgtaatgtcttcgacgccgcagacaaggtcgacttcctgtacgggaataaaatcctcttccgtaagcgtattgtccgctatttcattcagcctgcttcgcaaatccggcacatcttcggctttcagcgtcatccccgcagccattggatggccgccgaaatgaggaagaatatctctgcattcagaaaggctctcaaataaattaaatcctctgatgcttcgggccgaacctttagcgattcccttttcttcatcaataccaagaacaatggccggtcggtagaaacggtccacaagctttgaagccacaatcccgacgactcccgggttccatccggctttggccacgacaattgcagtttgatcgagcccttgctgttcaaccatgtcaatcgcttcatccgtcattttgctgaccattttttggcgctctttgttcagctggtcaatttctgcggcaagctcttccgcttcaaacgaatcctctgacataagcaaatgaacagcgggatccgcctgttcgattcttccgacggcattcagccttggtgcgagctgaaatccgactgtttcttcgttcgcttctccgatgtctccgcctgacagcttaatcagctcttttaagccgagccgatttgtccgtcgaagcctttcaagtcctagtgttgctattaatctgttttcgtcatgcagcgggactagatcggcaatggtgccgatagccgccaggtcaagcagttcatcaggaagttcacccaataaagcgtgggcaagcttaaacgcgactccaaccccggcaagctctttaaacgggtaagtgcagccaggctgcttcgggtggacgatcgcacggacatccggaagctccggtcccggttcatgatgatcggtaatgatgacatccagtccgagttcctttgccaccttcgcttcatgcacagcggcaattcctgtatcaaccgtaatgatcaaagagaagccccgttctttaattgaacgaaacgcctgttcattaggtccatatccttctttaaaacggtcaggtatataaaaatcaacttgagccgacagtttttgcagcgtgtgaagcatcactgacgtacttgtaaccccatcggcgtcataatcgccatatatcataatcttttcttgttgtgaaatcgcctgttttattcgatctgccgcttctttcatgcctttcatttcaaaaggatcataaaaatcggcatcctttgtatgtaaaaacagcctagcgctttctgccgtatcaaagcctctttttacaagcagggacgcaacaagaggtgttatatgcaattgttctgtgagtgatttgaccttatcctgatctggtcgctggatttcccatcgcatttttgacgctaacataaattcacccctcaaccaccctattatactagagcaggctgaggggtttcaaataatattcgaaaactagtcttttttctcaatcatggctgatgcatcctgtgtgtcagtctgatcagcaagatgagtatcctcttgtttatgtattgctgttctattttctttccgcaaggtttttatttcccgcttcaatttcattacctgaaaaatgccgacagaaaatacgatcagtgctcccattaaaactgagcccaaaataacaagaatgagcggccattctgatcttccaaacaggtaatcaacttctacggatcgaacattaatgactgcgaaaatagcgacaattaaggtgaaaataagtgcgaaaataatggtccattgtttattcattctcttttcccccaaacttcttattgaggtaactttccccatcaagactggttttaaacatggcttaacactaggttaagctccctttgctgttaatttttcccggatcagcctcttcagtccggttccctcaccggaaatcacaagtgtatcgccttcgtcaatgactgtttcagagctcggattcagttgtttatcctgattctttttaacaattgcaatgaccgtcacatgatattcctgacccacattcaaatcaccaatcgtctgatgaatggcaggcgctcccgcctctgctttacaccactctataatcaaatcatcaagggctgactcgacctgttctaatgctttcggtttatatgccattccgccaagaattgcagacatttgccttgcttcagcgtcatcaaactgcacggaggcaacacattcctcatggtcgttttcgtcaaaatagtaaagctctctccgtccgtcatgatgaatgataattgaaattttatcacggtttctagtaatcatttcaactttttgtcctatgcccggcagctctgattcgcgaaccctcatatataaaccctcctacatatctgaaaaccagccataaacacttttaacaccatatatatgtttaaatgtaagcgtatgtcattatagcaaatgtctattttaagttcaatgaaacttcaaaaaacaggctgccctgcagaggacagcctgatattttttattgcgccgaatcttttttcagttctcttcctttccatgcaagccaaatttgtgcggcaatgtatagagaagaataaacgcctgttaacagcccgaccaataaagcaattgagaagttagtaatagaagatgctccaaagatcagcaatgtcacaacaacaatcacaacggttaatacagtgttaattgaacgtgtaaaggtttgctgcaggctcaggtttactatatggttcagatcggcaaatgttttcggcttacgctttttcatatgctcgcggaccctgtcaaatgtaacgattgtatcgttaatggaatacccgattatcgtcaagatggccgcgatgaacgtaacatctacttcaagccttgtaatactgaagaatgtgacgataaagaatgcgtcatatagcaatgaagcaatggcagcaatcgccattttgtattcgaatcggattgaaacgtaaataatgatgccaatagaagctatagcaactgcgtacagcgcatttcttgccagctccttaccgactgtcggtgaaactgtgctgacatttggctcagacccgtatttgtctttaaaatacgtttttacttttgctatggtttctttatctggcaccccgacaaaacgggcaacaccgatattgctcttttcgcctgacagaactacagtatcagggtccatacccagagattcaaaatccttctcaacttgctctgtcgtcagcttatggtcgctttgtacttcaatccgtgcaccgcttgcaaagtcaatgccaagattcagcctgaacacaagcaggataataatcccggcaaccgtgaccgcactggagaaaataaagaagtatttgcgtttgctcgtgaaatcccatttttggaatggcgtatgcggctctgtattttcatccgtatcctgaatatccatgatatgtttcttattgacaccaaaccagccttttttccgatcaagccatctgctttccacaaggagagcgaggagaaatctcgataagaaaacggcagtgataaagcttgtcaaaatcgataggatcagcattgtcgcaaaccctttaacagagcttgtcccaaagataaagagcacaaccgctgcaataatggttgtaatattcgcgtcaaaaatcgtcgcaaatgaccgtctgtttcctgaacggaaggcagagcggactgactttcctagcttgagctcttctttaatccgctcataggtaataatgttggcgtcaacagccatcccgacacctaaaatgagagcggcaattcccggaagcgtgagtacggcattcatccagtcaaagatctggagtgtaatgtagatataaacagacagcgtaatcaccgcgattaatcccggcagacggtaatagaaaagcataaataagaaaataattgcgataccgacaataccggcaaacaccgtatcatggagagcctgctggccgaattgtgcgcctactgatgtcgaatatttttcagtcagtttcacaggaagtgcgcctgcatttaaaatgctggctaaatcttttgcttcttgaaccgtaaattgcccttcaattgtaacatcagttgtgtttaattcctggcttacatttggggcggatacatatttagggtgctctttttgaacctcttttttaaaggagtcccctttttcgtaatccatccaaataacaagctggttgtttggcgccattttcatgacctttttggtcacttcgccgaatttatcagcatctttcagtttaatgctgacaatcggttcatttgttttggcgtcatacgtttgtttagctccgttttcgacgaggtcagagccattcagcaattctttgtcattcgtatctctgaaagaaagctgcgcttcagtcgccaaaatttcacgcgctctgttttggtttgtcacaccagcgagctgaacgcgaatccggttattcccttcaatttggatgttcggttcgctgacaccgagaacattggcccggcggttcaatgcctctactgtgctgaccagaacgtcttttgtgattttgtcacctttttttacaggctgtacatcatacagcacctcaaatccgccttgcaaatccaatcctaacgtaatattgttagcggcaggcttcgtaaagtagcccaagcccgtgccaatcaatagaacgaaaaggaaaaacgcaatcaagcgtccttttttcattatgtatatcctcccttaaacctgtgcgaatcaacctgctatctcagcagttcttccaatgcttcctggccctcttcactgcccagccaattagacgttttaaatgactcaacggttgcatagttcataaattcgccaattttcactgataaaatatcactcgccagttcataaatgttcagttccgttttctttttccacttcttatctgttaagtatgaccacaaactttcgagttcaacatcatcatacccgagaatcttaaactcttccagtttgctgtaaagaaacggcctgacgtggtctttatatagatcggctggatgcttctccacgaattccacgctccttttttattgtttttcaagaagacttgtcatgcttggacgatatatacgcatatctttattgtatatgattccaggtagtttgagaaggcagggggtaaaaatggcgaaacagacgtttttaaagggcactcttatccttatcgcagcaggaatggttacaagaatgctcgggtttgtcaaccgggtggttatcgcccgttttatcggtgaagaaggagtcgggctttacatgatggcggcgcctaccttcttcttggccactacattaactcaattcggtctgccggtcgcgatcagcaagctagtcgctgaagccagtgcgcgcggagatcatcaaaaaacgaaaaatattttagtcatgtctctgaccatcacgggagtgctcagcctcatctttacaccgctgtttctgtttttcgccccggttatggctgaaacgatgctgacagataagcgaacactgtatccgctcttggccattacgccggttgtgccgattattgctatatcgagtgtgctgaggggatactttcaaggaaaacagaatatgaacccgcttgctatgtcacaagtccttgaacaggttgtccgcatttcactcgtggctgtctgcacaacgatttttctcccttacggaattgaatatgctgcagcgggggcaatgctatcctcagtggcaggggagctggcatcacttctttatttattcgtttgctttaagtataaaaagacaattaaaatcagaaagcattttttccagtcaattaaaaacggaaaacaaacctttacccaattaatgagcgtgtcccttccaacaaccgggagccgctttatcggaaacctctcttggtttttcgagccaatcgtcgtcgctcaaagccttgccatcgccggtgtggcaacagttgccgcaacaaagcaatacggggaactgaccggctttgccatgacgttgctgactctgcctagctttattacatattctttgtcgaccgcgcttgttcctgcgatcagtgaaggaatggagcagaaaaaattgcaggtggtggaataccgcttggaacaggcgatgcgtctctgtctgctcagcggaggcatttcagttgttattttatttgtatttgcggatgagctgatgagagtgatgtacggttcttcaggcgcagctgtatttataaaagtgatggccccgttttttctgctttattattttcaaggcccgcttcaagctgttctgcaggcgcttaatttggcaggagctgcgatgatgaacagcttaatcggagcgctagtcaaaacaggccttatttttgtccttgccacaaggccttctcttggcattatgggcgcggcattagccattgtgacaggcatggtgctcgtcacgctattgcacgcagcaaccgtaagcaaagtgctgccgatcagcatcaaaatcaaggagtacgcgctcagcttcgctgttattgtaatttgcggattcatcagctccgccatcaaacattatataagctttggagcatctgaggctgtcaatctagccggatggattgcggtgagcgccgccatttatatgatcctcctgctcgttttccgtttaattaaaaaagatgagcttcgccgcattcccattatcggacgtctgatcatccgataatagtcacgtgcggtacccatctttttcgtcaataaataattctccgtctgtaaacgagcaaaatgaaatatctgaagggtttgtgtatccgtgtttttgcaaactttcaagcagccattttctatctttactgattctggacaggttttctgtttgaatgaagccgtctataatgagcggcatttcgagctgccgatgctctccgctattttctttctttacaatagtcagtttgcccgacggctctaaaatggcaaatgatacgtcagctactctgtcgacgctattttctctgagttgaaccattaaatcatcaaaattatatcgctgtgatttcatggcttcttcgtcaatttttccatatttgataattatagtcggcttaccgtcaagaagctggcggacttttcggttttttaaagaaaagtatgccaaagtcacttgaatgatcattaatacaagcattggcaaaatggtatgaaatagatgatcgtctacgttttctatggctaaaacggcaatttcagccatcatgataaagacaacgagatctaaaatactaagctctccgatctcccgtttgcccatgaaacgaaaaatgaccaatatcacaaaatacaatacgactgtgcgaaacgcaatagtgagaagctcttccatcatgcacctccaactcattataggttgcaacaaaatgatcaatttatgtaagaaaaaccgattgcatttcacaaagcttttacgtctaattcaagggataagggaatacatttttacaaagacgagccatcagcatgtctgacggctttgtgcaaaaagaacagaagccttttaatacaggcagagaggagacaatcatggaggaaacgaaacaagttggaaaaggcattctttacggcttaatcgccatattttcagccatgctcctgacaagtttggcggtttcacttttattgaccgcaacctcgctggaagaatcatcatttaactggctgatcacagctatctcatttctctctttatttatcggcgggttcatttcaggcgggaaaggcaaggaaagaggctggatgattggcgcattgaccgccttaagtttttctctgattatcttattgtttcagtatttaggattcggaaagacatttacagcagaacagctgatcttccatctgggatttttaggggtgtgcatgctgggcgggattttcggcgtgaacatgaggggaaacaggtcttccacataaaaaagagcgggctcacttgcccgctcttttttgtttgctatgtatagctcctgctgttattcagcagcagaaacttctctgatcgcgcggcggtcgaacgtaagacgtgtgttatcaccagtcttaattacgactttgctttcgtcgatagagtcaacagtaccgtgcaatcccccgattgtcactactgaatcgccttttttcagttcctcttgcatttggcgtacagccttttgctgcttttgctgaggacgaatcagcaagaagtaaaggaccgcaaacattaaaataataggaaccaatgtacctaaagtgccagtcatcattttcacccctttctgtaagcctgttatgtttatttagaagcttttcgcatttggcttgttatagccgtaacgctcaaagaactcttctctgaaatcacccagacgatcctcgcgaatagcctgtcttacctgctccattaagtgtaacagaaaatgaaggttatggtaagttgttaatcgaaggccgaatgtttcattacagcgaatcaagtgcctaatgtacgcgcgagtgtagtttttacatgtatagcaatcacactcttcatcaatcggacggaagtctctttcaaatttcgcatttttcatattgagtcgtccttcagcagtaaacactgtgccgtttcttgcaatccgtgtaggcagcacacagtcaaacatatcgaccccgcggatcgctccgtcgatcagtgcatccggagaacctactcccatcagatatctcggtttatccttcggcaagagcggtgttgtaaattcgagtacacggttcatgacatccttcggttcacctacagacaatccgcctatagcatatcccggaaaatcaagcgaaatcaagtccttcgcactttgtgtccgcagatcttcatattctccgccttgtacaataccaaacagcccttgttcatcctgacgattgtgggcattcaggcagcgttccgcccagcggcttgtccgctcaactgacctcttcatgtagtcgtactccgccgggtatggcgggcattcatcaaacgccatcataatatcagagccgagtgcgttttggatctccatcgctttttccggagataaaaacagcttgtctccatttagatgattgcggaaatggacaccctcttcctctatattacgaaacttgcttaaagaaaagacctgaaaaccgcctgaatcggttaaaattgcgcggtcccagttcataaatttatggagcccgcccgcttctttgacaatgtcttggcccggacgaagccatagatgataagtattgctcaaaatgatgcctgcatccattgctttcagctcttcaggcgacattgttttgactgtcgccagtgtgccgaccggcataaaaaccggcgtttcaaaggagccgtgaggcgtatgcactttgcccagccgcgctcctgtttgtttgcattcttttataaattcatagcgtattggttgttcagccacttttgatgaggcctcctgttctcaaattatataatcagcatcgcgtctccgaagctgaagaaacggtattcctcttccactgcatggttataggcacgcagaatgttttctcttccagcaagcgcgctgaccagcataatcaatgacgatttcggcaaatggaagtttgtaatcattccgtcaatggctttaaattcatagcccggataaataaaaatagatgtccagccgcttgatgctttaaattgcccgtcatgttccccggcaatcgtctcaagcgtgcgtgtcgaggtcgtgccgacagaaatgatccgaccgccattttctcttactttgtttaaggctgcagccgtttcttctgacatttgataaaactctgcatgcatattatgctcttccacttcatcggcactcacagggcgaaacgttccaaggcctacgtgcagtgtgatgaactcaatttgcacgcctttgtctttcagctgctgtaagatttcttccgtgaagtgaaggccagctgtaggcgcagcagcagagccgatttcttttgaatacactgtctggtagcgctctttgtcatcaagctgttctttgatatatggagggagcggcatctctccaagggattcaagcacctcgtagaaaataccgtcatattgaaattccatctttctgccgccgtgctcaagctcttccgtgcagattgccttcaatcttccgtctccaaatgtgacaacagttccttttttcacccgtttcgccggtttggcaagtgtttcccatttatcaccggtttcctgtttcaacaaaagaagttccactttcgcgccggtatcctcttttgtgccgaataaccgcgcaggcagtacccgggtattgttcaggactagacaatcgccttcgttaaagaagctgataatgtgtttaaacgagctgtcagtaagctctcctgtatgtttatcgagcaccatcagccttgaagcatcacgctgctccaacggtacttgtgcaattaaacgttctggtagttcaaaatcaaataaatcgactttcatgatgatttcacctttattctagtcttttgttatttcattctgccaaaaagattaagcaaaattgataataccacacttataataatacaagtgacaaccgggaagaaaaacgtgacatttcctttttttacaaaaatatctcccggcatcttgccgacaaaatgcaaaactgctccgataataagcaaaacagcaccaagaatcataatgatcttaggaaattcagtcatatcggggagcctccatttggaaatgatgataaacggccggtgtcacgatccttccacgcggcgttctttgtataaatccaatttgcagcagatatggttcatatacgtcttcaatcgtatgcgattcctcgccgatggtagctgaaatcgtatcaaggcctactgggccgccgttgaatttttcgatcatgcccatcagcagcttatgatcaatatgatccaaaccgaggcggtcaacctgaagccgctccagcgcattctgagaaatgtcttccgtaatcctgctgtcacccagcacttgggcgaaatcgcgcacccttctcagcaggcggttcgccacgcggggcgtccctctcgatcttcttgcaatttcaagagccgacggtttatcaatctcaacctcgaatacatcagcggttcttgtgacaatatccgccagttcttcttgtgtatagtactcaaggcgagacatgacgccgaatctgtctcttaaaggagccgtcaaaagccccaccctcgtcgtggctcccaccagcgtaaaaggcggaaggtcgaggcgaaccgagcgggcagatgggcctttgccaatcacaatgtccaggcaaaagtcttccattgcaggataaagcacctcttcgatcgatctgtgcagcctatgtatttcatcaataaataatacatctcccggttccagcgccgttaatatagcagccaaatcaccaggcctttcaatcgcaggccctgatgtcgtccgcaattccactcccatttcattagcaacaatcgaagcaagcgttgtttttccgagtccgggcggcccgtacagaagaacatgatccagcgtctcctgtctcattttcgccgcatctataaacacgcgcaaattttcttttaccttatgctgcccgatatactgtgccagattttgcggcctcaggctttgctctatcactgattcatggttgtctgcttcacttgagacgagccgttcatccatgaacatcaccttactttaatagtttttgtaatgcttttttcacatattggtctgttgtcagcccaatttcttctttaaggtgaggaagcacctttttgatttctttttcagcatatccgagaaccctgagggcttcaagtgcttcttcaagagccgtttccgctgtttgcttttcaagcctttcttcatgattaaacagattttcaatcatttcaggcacaacatctgccagctttccttttaaatctagaataatctggcgtgcggttttttttcctactccaggaaacttgaccaaaaaagcttcatcttcattttcaattgcttgaatgaccgctccgggatcacccgagcccaagatggcaagtgctcctttcgggccaattccggtcacgtttaacagctttgtaaagagcgccttctcctctcttgttgaaaaaccgtaaagcgaaaaagcatcctctctgatatgatggtatgtaaaaatcgtttcctggcttctctccttatatataaagggattcggcgtgaaaatctgatagccgatgccgccgttctctatgacaatatattggggagatacataatcaatcgtccctttaacaaattcaatcacgcaaattcacctctttgactgttcttcattgtaccataaaaacagccaaagtcttatagaaaagttaacatacgttcgcttctctctcattctttcacgaaaaaaaagacatgaattcatgtcttcaatcagcggacgttacccgctgtatgtcttcatatgttcgatgacatcctcaaactccgcttttgtccgaaatggaatgcctttcagcagatttttttgcatatggctttccagcctttctaaatcaatttgaaaaaaagactgaattggttcggaagctggctcaggccgcccatgaaaagtggaaatcactccattatccgatacaccgatatacccgttgaccttgctgagcggagaaatatcgtccatttgcttccggaagagcacatatccctttttttgttccacaagcgtccatccggcataagctgcccaaaaatcatccatagaaaacactttttcatgcttatgctcaatgctgacatcgccgtccaaatacaccttttcaagctgcacatgcacctgcagcggctcatagtgctccacttccgcgccaagtgcgcgggaaggagctcctattaaaaatactgccgctgagcaaagaatgcccagcaaaagatacgccgtgctgaatcgtttcaccctctacacctctttgcacacgtttatgattagtttgaccaaagaggctactgcttaaccgttttatcaaaatttgtctgcacattttccctgacaaaccgttcctccgtatacacatctgtgctttgctcagaaattgtcaagaatcgcgtcagaaaggcactgaaaaaatacaatgccgcaaagatccaaatcacgccgcctgcaccgagcggcccaatgaaaagactcacgatgcccggcgcgataaacgcacataaaccagatcccaaattcaacactgacatggcagcacctttattatcaggtgcaagcgtcggcaaaagcgcgcttaatgggacgtaccctgctaaagccgcgccgtagcagcaggcgataatcatgagcacccaatactgatgcccgatcagctgaggcgtgtaatacagcgccagcgtaaaaataccgcatccgacaccgccaaaccacatgaccgtattgcgccagccaagtttatctccgactgcaccgaaaatgatattaaacacaatattcacaaaaaacagcgtcccccatatttgcagccattccgaaaccgaatacccgtatcgtgctaaataagtaggaagaaagatggcaaatccaaattgtcctatcgcattaatcgtcttgaccactccgccgatgcctaccttagggttttcaaacataattgtaaatgccttcgacaattctttccatttcggctgatcttgtttttgtatcggagtaaatttatctttgttaaaaaataaggcaagaattccgcctgccgccacaaacagtaaagcgctccaaagcgtattgatttctccaaaggccggaactgcatagctggaatagaacgggcccagcacgttaaggccgcacgtaaacataaaccaaaaccagccgacggctttgccgagaatattttgagaggtgctgtatgacacccatacgagaaaagagtatgcaaacagcggatatcccaagcctctaagagcatagctgcccaagagagccggataatacatatgaggaatcgcccagccgataaaagcggccgaaccgaggataaatgcaagcaatccgacagtcatcgtttttctcggcccccaagtttggacaaacgttcctgaaagccaagctgagatggtgacagcaatgccgtacatggtaaataacgatgcggattgctgcatactgagaccatgatcaacgagaaaaggagacagccagccttgttcgaggccgtctccaaccataaagatgacaacgccaatataaccccaaaccatgtgagaaggaattccgattttgttcaaaacatttcctttagcatgtactgtattcattttctccaccgcctacttaaagtatcaatggagtatatacccaagcttgctgaattgtaatcctgttagattaaaaagcgattttttcagtgtgctcaatgctgacaggcatgccaaaagcaagcgattgctgtgctgctctggcgatccttccggcctgtaaaccgtcattgccggtgcagggagtctcctggtttgtgccgatcgcttctgcaaaacggagaatctcctcctcatatgaatccttatagcgttcaaggaaaaagaaatgcggtttatccttcatcacaaaatcagctgttgacacctcaaccgttgtcggcctgctattatcagccgctgcagagcctttcgtcccgaaaacctcaacccgctggtcatatccgtacacagcttggcggctgttatcaatcacagccatggcaccgttttcaaaagtcagtgtaataacagctgtatcaatatcacccagctccgcaaaagaaggattcaccaaagctgcccctttggcatacacttccgtcacttcgcttcccataatatatctggccatatcaaaatcatggatcgacatatccataaacaatccgcctgacgtacggacataatctatattcggggttctgggtcccgggacgtgatttttaataaatgaggtgtaccgatttcaccattttcaacaatcgttttgattttcttaaaatgaggatcaaagcggcggttaaatccgacttgaagtgttacaccgtgtttccggacagccgcaagcgcttcactcgtttcgtccagagagaaactaacgggcttctcacaaaatatatgctttttcgcctcggctgcttctttgatcatctgtgcatgtacggctgtaggagagcaaataaaaatagcatcaatatcaggatcatgtaataaatcacgataatcagaggttatgtattcaatctgatgactgtcggcccagctttttatacggcttgcctgaatgtcagagactgcttttattttcatgtgaggaatccggcttatattttgaacatgaagtttgccgatgcggcctgcaccgataatccctgtcacaatctgttttgtcatggcttcttcccccttgatcattcacgaaagcgctttatttaaaattaatactatcccatttgtaagcgcttttcaagaatggaaattaaacgttctatgtctcttttatcacaattcatgcttataagtagccttcttcttcaagaccagatacactagaattaggctctttttcctgaacagtttatgattttcctataaacagctgcataaaatagagcaaagaaggtgaatgaaatgctgacaaaagcagaggcactggcccataccgtcatataccgcaagaacagcagatttgataaagtcaaagagaaatccgaggaattaacactaatcggcaagggaagaagcgcctatgtgtttgccttaacagaaggcggtcgaaaaatggcgctgaaagtattttttccggaatatcaagcgacagcagtcaaagaagcagcgatctatgaaaaattagccgggtccgcattctatcctgacatttacgaaactggcgattcatttattctcatggaatatattaaaggtgaaaccttttataactgtctgaagaaaggcattgcaatcagtgatgacatgattcagcaggttgaagaagcgctttctgacgcccgggcagccggactgaacccgtcagatattcatttgcggaatctgatattgacagaaaccggggcggtgcgggtgattgatgttgcgagatttgagcagacaaaaacatgcacgcagtgggacgacttaaaatccgcatatcatgcactctacaaaaaaccgatattccccaaaaagattccgggtttttggctggagatcatcgcatttttatataagaaagattggtttcaaaagcatttcgcacagcggaaaagaaaatattcttaaatcaaaaaggcagccgcacaagcggctgcctttatcatgtattttttactttctgacggcagaaatcagtttcatttgttcaggcgacagcttaattcgatagcctctcacagttaagtagaccgcttctgggtccttctcaccggaatgacaatacgttttttccatttctgtctcccctcaccctttattggctttatttcatcttatcattgctttattaaggtagttttaaagaaatgtaaagatcatatgaatccgatatatagtaaaatgagagaaaaaaagggagagagtcacattaagacacgcagcaacatcccgcttattatgtttgccctgctggtcttcttcggcggcgccatctattggatgttattttcactaaaaaacgttccgaaaggcaatctcgtccaatcggttgattcgccggacggcagctatacgttaaacacttatgtatccgaaaacatcttgagcttagatgcagccagaggtgaacttgtaaatgaaaaaacacttgtcaagagaacaatctactggaattacccggacagccgcccagcagtgacgtggatcaatcacaatacagtgaaaatcggcaatcagactttacatcttgatactgatgaaacgtatgattggcgaaaagatgatcattggatccgtgaaaaaccgccgcaggcgtcagtgaggtgatgaaacatgaataagatgaacggaacaaatgatgacaagcatttcaatcattttgtgattgctttatcctttatatacggtttgactgaactaggctatttgttgctgaaggattttataacaattgccataagtttgcctctgtagaaaaacgcagcgtagtcgatacgccgcgttttttctttttcccttcctcttcttattgttaattacaggtcatataatgtgacaaatcgattgtagaaatagttcgattagaccaaaatcctttttatacatgtattcgaatttgaagtgagggggaagcttgatggcagattttgttgctagtttgaatgcggtcttatggagtacgcccgtcatttatattttattgggaattggattcaccttttcaattatgacccgttttttacaagtccgacatttaaaagaaatgattgttcagatgttcaaaggcaagagctctgaagccggcgtttcatctttccaagcgttatcgattgcgctgtccggccgtgtgggcacaggaaacatcgcgggagtggcgacagcaattgcattcggcggacccggtgcagtgttctggatgtgggcgattgcctttatcggggcggcgagtgcctttgtagaatcaacgcttgctcaaatttacaaagtgaaacaagacggtcaatatcggggcggccctgcttattatatagaaaaaggcttaggcattaagtggtttgccgtcttatttgccgctgctgcccttattgcaatggcctttctaatgccgggcgtacagtccaactccattgcggctgggatccaaaatgcattcggcatctctcctttcgtcacagggtgtggtctggttttattattagggttcattatttttggcggcgtcaaacgaattgccaatgcggcgcaaatgattgttccatttatggccattggatatatcctgctgtctttgattattattgtcatgaatgtgtctgaattgcctgctgtgatctcattaatattcaaaagcgcctttgcattggattccgcttttggcggcttgatcggcatggcgatttcctggggcgttaaacgtggcatttattcaaacgaagccggccagggaacaggcccgcatccggcagctgctgcagaggtttctcatccggtcaagcagggactggttcaggcattttctgtttatattgacaccttgtttgtatgttccgctacagctttcatgatcttgtttaccggcatgtacaatacccaggctgcagatggttcctttatcgttcaccagcttaaaggcgtagaagcaggacctggtttcacacaagcggcaattgacagtgttcttcccggattcggtgcaggctttgttgccatcgctttattcttcttcgcttttacaacaattatggcgtactactacatcgcagaaacaaatatcgcctatttagcacgaggcagagaaagcaaatgggcgatgcttggcttaaaactgattattttagccgccacgttctatggtactgtgaaaacagcttcacttgcttgggcattaggggatgcagggcttggcattatggtatggctgaacgtcattgccattgtgctgcttgccaagccggcgctccttgctttaaaggattatgagcgccaaaagaagcagggcttagacccgatctttgatccaaaagcgctgggtatcaaaaacgctgatttctgggagaaagaatacactcatgaaagtgaacgtgtctcctgaacatactaaaaccggcccgatatgacctcgtgccggttttttatgaacgatagtttgtatacacttcttgaacatcatcgtcatcttcaaggacgtctattaatgtttccagcttctcaacagcctgatcatcggcttctgcataggtattgggaagcatggtcacctccgccgaagaaattggatatttcgattcgagggctgttttcacctcttcaaaatgctcaggctctgtgaaaacctcatataggttttcttcaattcgcagctcttctcctcctgcttcaagcacatcaagcatgagctcatcttcttctatttgccattcagtacggtctatcgtaatgaacccctttcgttcaaataaaaaggctacacatccgctttctcccagacttccgccatttttattaaaggctgtccgcacatttgacgccgttcggtttttattatctgttacgcattcaaccatgacggcaatccctgaagggccgtagccttcataggtgatttcttcatagctgcttccgtcttggcctcccgcagcttttttaatggcccgatctatattttcattcggcatattggcgccttttgctttttcgatgacaagacgcaatgctgaatttgcttctggatccgctccgccttctttcgctgccacatagatttcttttgccagcttcataaatattttcccgcgctttgcatcctgtgcattttttcttttttgaatgtttttccacttggaatggcctgccatgttttcaccttcttttacattttctatgtacactttaatgggaattgttcgctgatgcaaagaaaaaggctgccgaatatccttccggcagcccttccttcctagcggttgttcattttatgaagttttctgaacagccctttatctgttgatacttggacgtcacggccatttgcatagttgcgcgctgcttttacgacattatctctgtcagactttgtgaactctctgtggcttttgactgcgataactactcggtcatcggataccataacttgtgtgtcattgacgtttttcacttgtttcacacggttggcaatttttgcagccagtcttctgttttcttggttgtcatacccgttgttcgctgcattccgattcatgtttcggttattcgtgttgttatatgttccgtcagttgccaaaggaacacgatcgtcagcagtaacacggtcacggttatttacattcgtggtgtttcggttaccgtcgttctgatcctccattaattcagaaacaggaccatcgtggtcgattccgtctccctgtctatcggcgtcattttcatttgtataatatccgattggacgggtattgccgttattgcgcgtatcattcatagcattatcgtttgctccgcatgctgttaagccggctgtcattagaatcaggctagcgatcgtcatttttttacccaatggaaaaaccccccgtggacgaattgagcatgtttgctcgcttttatcatgtgcgtatggggggcatgttaagcgtgtcagttctctccatttggcagtgatcagcttgaaaataaaaaaaggaacgatttacatcgttccgaacaatcactcattttcttcttccggccggccaaacatttggtttacagaaggctggttcgtcattggcatagaaactcctgccgaatatgggtttggatttgggttagctgtgccatatggcatattagggcttccataagctcccattcccgaatggccaggcgcagagaaatatggctgatgatcaccgtcacagccgcagtcgtcatgatctttgtatggcatgtaaccatgagccgcagcaggctggtatgctcccattacttggggagtgccgtaataagggccatacggcatatgtccatacggagatccataagccggagatgcgtattgcggcgcaccgtatgaaccgtaatgtccgtgatggctgttttcatgatgctggttttcataacccgggtcatactgaggcgatacaaatcctggctggtatccatgcatcggatgcattggataagcttgtgccggatagtacggatagcataatcctgatcctggaagaattggcgaaacaggcaccggacacggtacgaaatgagccggataatgataataaggctgaacagccggcatcggcatattcggaactgtgtgatgaacgttttcctcttctacaccgcctacctctggcgcctttggcatattaggcatattcggataattagcattttccatattactcatagcctcctgttgtggaaattggtcttgcatatgatacatatgatccatatttccgtcatgatgtttttttggctcctccggtttaggaggcgaccaaggctggaaaagctgtttcatatcataataatcgttcacatcagcttcagggtacacattttcctgcaaattaggcatcggcgggacatacggcatggacttcttttctttcggctttgtgtcttctacatcgacaacggatttaggcttctctttcgcatatggatgttcttgcttcacactcccggccgcaggacttttgcccgcttttggctcttttctgaccgggactccttctgacggcacttttattttcattccaggcatgattaagtctggattgctaagctgtgtattgagttttttcacttcctcaacatcgactccgtacttttcagctattttccagagcgaatcgcctttttgaacgatatggattttcaacgttttcccctcctatgcaaaacgtgaacagttcagctgtgattacaatatgtttcttcacaacatatgcctgaacaaaagaagttatgagtaaaggaagggaaaatatttctgatctacgtgatcgaaagcattcgattcagggcaaggagtgcatcttcctgaatggcttttggcaccttgatgacgcctgaaggttctcctttttcaatttgttccagcgaccacaacaaatgcggcaaatcaattcggttcattgtcaggcaagggcacatgtcagggttgagtgattcgatttgtttatctggatgctcgtgaatgatccgcagaacaagattcatttctgtcccgattgcccacttgcttcccgccggagcctggttgattgtgtcgataatatatttcgttgatccgttatcatcgcttagtgtcacgacttcgtgtgaacattccgggtgcacaatgatctgaatgtcggggtctcgctctctcatatcatggatatttttagtggtgaatttctcgtgaacagagcaatgccctttccacaaaatcactttcacattcgtatgcccggattcagctactaattcatctttcatcggatcccacacagccatatcttcaagcgcaatgcccagatcataagccgtatttctccctaaatgctgatcaggcaaaaataaaattctttttttctgtgtaaacgcccattcaagcacttttttcgcattcgaagaagttacagttgctccgccatgctttccgacgaatgccttgatctccgcagtggagttcacataagttaaaggtatgatcgtatctccaaatatatgctgaagcttcttccatgccctattggtctgctgcatgtcagccatgtcagccatagaacatccagctctcatatctggcaggacgaccgtttgctgctcgcttgtcagcatatcggcggtttctgccataaagtgaacgccgcaaaatacgatataatccgcttctttgtttttttccgctacttgggccaattgcagggagtcgcctgtttggtcagcaaattgtatcacttcatccttttgataatgatggcctggtataaagagcctgctgccgaactttttcttaatggcggcaacgcgcgtttccatatcctttctcgatagttctttataactttcgggcatcatatcattcgattgtttgatcacatcaagaattgacataacggcattcctccacagattcatttgataacgtaacatccatgctgatatctaaacttttgacggaatgagtcagaaatcctaatgaaatataattcacacccgtccctttaaaagcaggcaaagattctaacgtaatcccgccagaggcttcagtttttatatgagccggtgtgagctttgcaaaatgacggaccgtatcaggcggacagttgtcaaacataataacatccgctccagctgcaattgcttcccgcagctgtccctccgtttcaatttccacctcgatatttaccatgtgccctgcggcctgacgggcttttttgcacgcctctaaaatagagccgcatgctgcgatatgattatctttaatcatgatgccgtcatacaaaccgaatcgatgattatacccgccgccggctctgacagcatatttctccagcattctgagccccggtgttgtttttctcgtgtcacaaattttaatctgttcatcatccagacaccgaacagcctctcttgtcattgtcgcaattcctgacagtctctgaataagatttaatacgacccgctctcctgaaaggagcgcagctgcgggaccgtgtaactcggcaatcacttcacctttatgcaacatgtccccatcttttttgtttaaaatgatttgaacattttcgtccaataacgaaaagccttcttttatgatcgctgctcctgcaaaaataccctctgactttgcaacaatctccgcttcacagctctgttctccaaaaatagactgcgatgtaagatcccctgtcccaatatcctcaagaaaaaagtgattcagtaattttttcagctgtaaatgattcattgttccaaatcccctcgttttttctgatcttcgttcctttttttgtatggacaatttgtcttccttgccagcccacctcagtatgaggaaaatcggttcggaagtgagcccctctgctttcctcccgcaaaagcgcagaaaacgtcatcagctttgcagtttgccatagatgagaaagttccatctgccgaattgtgatatccttcacatttacttcctgaaaaggcagcgtatgaagccagatgctaagctcaatcaaactgctttgttcccgcagaatagacatgtggcttgtcattttgctttgcagttcatgcacctctatatccggcacctcgtagaagacactggtttctagccctgattgatattgcctgttataagccggtttttggataatatgctctgctgccctttttccaaataccagcgcttccaataaagaattgcttgcaagccggtttgctccatgtaaaccggagcatgctgtctcgccaatcgcataaagccccggcactgtcgtttctccccagcgattaactgaaacacctcccattaagaaatgcattcccggagcaacaggaatttttccgctgtggatatcaatccctgctttttcacaaatagcggtgatagtagggaaacgcgtttcaaaatcagaaatcgcactgaagtctatataaacgcgatttccttttgccatttcttcgtgaataacccgtgagacaatatctcttggagccaggtcacctaaaggatgccgttcagccataatcctgcggccgttttcgtctactaaacatccgccttcccctctgacagcttctgaaacaagcccgtagaaaacaccatttttcacaagcagtgtcgggtgaaactgagtaaactccaaatccgttaattccgccccggcccggtaagccagagaaagaccgtcacctgtgacagtgagatcattcgtatggtgaagaaacaggtttccacagccgccggcagccagcacaacttcgtctgcgtgccttaccttgagccgccctttgctgtcttttgtcatgacgccgatacatcgtccgtcctctataagcaaatctgctgccatttcattctcgattaacttgattttgctgttgatccgtttgagcaaataatcgataagcagcctgcctgttgcgtctccgcctgcatgaaatatgcggttgtatgagtgggccccttctcttccaagacaaacaccgcctcgttcattgcggtcgaatggaaatccacgctccaataggctttgaaccatcatttttccatcatgtaatacgtctgctgcaatagctagattattatggccgcatcctgcgtataacgtatcctccagatgggcttcaatcgagtcatcttttgcataggccgcagcaatcccgccttgtgcatagacagaattgctgtttttgacgcttttttttgtgataacagtcacttcgtatgagggcgggaaagctgcagctaaggaaagtgccgccgcccctgaaccgatgactgcaatcgtctttttagacatatgccatcctcctgttgtttacacctgtcttgacacctatatttacacaaggataaaataaactcaagagttttttatggagaacggatggaggaagaccggatgatttatttagattatgcagcgacaacgcctatttgtgaggaagcccttactgtatatcagaagcttagtatggatatgtacggaaatgccagcagcctgcatgatgcaggaggaaaagcaaagcacatactggagtactgccgtgaaaaaatcgccaacatcattggcggagaagcaagcggcatctattttacaagcggcggcactgaatccaattttctggccattcaatcattgctaaacggcctgccaaaaacgaaaagacattttattacgactgccatggagcatcagtccattcataattgcgctgcttttttggaacagcagggatatgatgtaacagtcattgaaccgaatgaatacgggcttattaccgaggaaatattactagcccatatccggccggaaacaggccttgtatctattcagcatgcaaattctgaaaccgggatcattcagcccattcaccgcctgtcttcatacctgcacaataagggcattcttcttcattgcgacgctgttcaaacgtttggaaagatcccgatcaatacaaaaaatctgggagtagatgcactctcaatgtccagccataaaatccacggtccaaaaggagtaggggcggtctatatccgtccggatgtcccttggaaacccgtttatcctctgactactcacgaatacggattcagagccggcaccgtaaatgttcccgggatcggtgccttcactgccgctgcagaattgatcgtaagcgaaatggaaaaacagatatcccgcaatgaggcattaagaacttactttctagaccaaatccgtattcggtctctccctgtaacccttgcggcagacacttcgcaagcagaatgtcttccgcatattatagggtgtttttttcactcatttgaaggacaatatgttatgttagaatgtaatcggagtaatatttgcatttcaaccggcagcgcttgttctgcaggttaccacggtccgtctgaaacaatgaaagcattaagaaaaaccgaacaagaagctctgcaatttatccgcatctcttttggcaggcatacaacagctgaacagctggaacagttattacatacgtttacagtgctttgggaacaaaagaaaggagaatttgatattgaccgaagaattaaagctaatgggcgccaacaggcgtgaccagcttcttctgtggctgaaggaatctaaatcaccgctgacaggaggagaactcgcaaaaaaagcgaacgtttcaagacaggttattgtacaggatatatcgctcttgaaagcgaaaaatgtaccgattatcgccacaagccaaggatatgtatacatggatgcagccgctcagcagcaccagcaggcagaaagaatcatagcatgtctgcacggtcctgaacggacagaagaggaactgcagctcatcgtcgacgaaggcgttacagtaaaagacgtaaaaatcgagcatcccgtgtatggagatttaactgcagccatccaagtaggcacccggaaggaagttagccatttcattaaaaaaatcaattctacgaatgctgcctacttatcacagctgaccgacggcgtgcacctgcatacactgacagcacctgatgaacatcgcatcgatcaagcttgccaagccctcgaagaagccggcattttaattaaagactaaaaaaagccctctagagggcttttttataattggtaagactggtatgcacccaggagctttactttgcagccgagcgcttcaagctcctgcatggcccctggaatcaatacatcatcaaacgctttctcaatatcaataataaagaaataatggcctaatccggttttagtcggacgtgactcaatttttgacaagtttaaatttctccaagaaaatgcagacagcactctatgcagcgccccggactgatcatcctgcggcagcatgaccattaaggtcgttttgggcctagaactcaattttgaattcacttcaaaagatatgttttcatcaggagacaggataacaaatcttgtatgattgtccctataatcctgtatatcccgtttcacgatttttaattcgtatgtagaagctgccatatcattggcaatgaccccgatattcagctctggatggtcactgacaaactttgctgccgccccggtagaattggcgtattcatatggaacggaaggaaaatgtcgatggagaaatttatggcattgcgcaatcgcgtgtgaatgcgagtaaattctgtcgagctctttccatgcattctctcttgagggatgaacgagcaagtgctgatgaatcggcaacgtcatttcacccacgattggcaagggctgttcatgtattaaatagtctattgttagattaacagatccttctaaagcattttccaaaggaacaaaagcaaaatcaacttcgcctgcaacggctgcatctatacactccggaatggtgcggtaagcaacatgttcggcgccgttttgaaaacaagaactgactgctagatgtgtaaatgtagctgctggacctaaataaccgactttcatgacgattttctctcccttatgcacctgaacctaatatttcaaccttttctacaaaatcaaacttcctgagcttattcattaatgtatgaatgtcttcttccattgccgacgtactgatagacagtgtcacatttgctctgccttgaagcggaatggtctggtgaatggaaagaacgttgcttccagaatcagctaccgcctgaagaagctgagataacgcacctgacctatcctccaaatgaaagaaaagtgtgataatttgttcttttaccatggtgtagaatggaaaaacagcatccctgtatttataaaacgcacttctgcttaaatcgaccttttgaacggcatctgctactgaatctgctttttttcgatcaagcagctttttgacttctaatgtttttctcattgcatcgggcaatacatcttcacggacaagataaaatgtctcctctttcatttgcatcccccctttaaaatagagagcctggcaccaggctctcttttcagccaacattcattaatcaataaattcaaattcaaattccagaagcctgattatatctccatccttggctccgcgttctctgagtgcttcatcaacacccattccgcgcatctgtcttgcaaaccgtttaaccgattcatcacgtgagaaatcagtcatcttgaataaccgctcaaggctgtctcctgaaagcacaaatacaccgtctggatcgcgtgtaatgttaaatggcacttcttcattttccatcgtgtacatgacacggttttgtgtaagctcttcctcgtcatacagcgggaattccggtgtgttctcaagctgattggcaacctcaaacagaagctcacgcagaccttctcttgtcaccgcactgatcgggaataccggataatcatccgtcagcttttctttaaaggcttcgagattttccgcagcctccggcatgtccattttatttgcaacgataatttgcggacgctcagtgagacgcagattgtactcgctcagctcctggttaatcgtaagataatcctcatacggatcgcggccctctaagcccgacatgtcaatgacgtgaacaataaccctcgtccgttcaatatggcgcaaaaactggtggcccagtccgatgccttggtgtgcgccttcaatcagtcctggcaaatcagccatgacaaagctgcgtccgtcatccgtttcaaccatgccgagattcgggacaagcgttgtaaagtgatagtccgcaattttcggttttgcagatgagacaacagacagcaaagtcgattttcccacactcgggaacccgacaagcccgacatccgcaagcacttttaattcaagaacaatgtagcgttcttttcccggctcgccgttttctgaaagctgaggcgcgggattagccggtgtagcaaagcggctattccctcttccgcctcttccgcctcttgcaatgacagcccgctgtccgtgctctgttaaatcagcgatgacctgttttgtatcatcgtctgtcacaacggtgcccggcggaactttaataaccatatcatcagcatttcgtccgtgctggtttttggacatgccatgctcgccgcgaatcgctttaaagtgttttttgtatctaaaatccatcagggtgcggagaccttcatctacttcaaaaacgacgtctcctcccttacctccgtcaccgccggcagggccgcctttcggcacatatttttcacggcgaaacgcaaccataccgttgccgccgtcgccgccttttacatatactttgacctgatctacaaacataatgtcctccgttctaaaccgttaaaaactccgctagtccaacccaatctcaatcagacattcgtgactcgtgatttcaaaacgcatgatatcaacgtcctcatatccattctgccgaatatcatcaaaagcagatggatcggcaaaggcgccgtgaaaatcaaggtacagaatcagctgtctgtcaggatgatccgtttgaagcgaaaccgttaaatgattttcactctctctgctgactgcttgatcaaacagatgaaacagctttctcatcagtttcgccagcttttgatcataagccgacaaatccttaatttctccgagaacttcatattcaagcgtcatataatgggttttccaattaaacgtaagaaaatcaaacgccaaatgcggtgttttcaggtttgagagctttgattcgtgctttgcgtctataaccatttcttcaatcatttcaaagacgcggtcatacttctgcaagcttaagtttcctttaatcagctgcagcttattcatccaatcatgccgggaatggccaagcagatgaatcagttcgtttgttaatgccgtgtcgcttatattttcttcttgattttttgaaacatccttcattttcgcactcccaatcatttaatttcttatttaggagtctgtataagtgtgtattatgaattataacagagaaggctttgttagaaaaacaattgtttttcccagaaatatcatgttccttttttctggctttggttgatttgcagccaggcagaacattttatgtattactgcttggggaacatatccagtgggtttgagatgtttattctcattcttggcggggtctgctcgcacatactctgcatttcattctaggtgtttactccgcatattgcaaaaaaaactccagtcatcatcgaccggagttttttgaatcattattgagctacaggatatacgctcacttttttgcggtcacggccgaaacgttcgaatttaacagttccgtcgattttcgcaaatagagtgtcatctccgccgcggcccacgttttcacctgggtaaatttttgttccgcgttgacggtaaaggatagaaccgcctgttacgaattgaccgtcagcacgtttagcacctaaacgtttagcctcagagtcacgtccgttctttgtagaacctactccttttttagaagcgaaaaactgaagatctaatctaagcatgtagctcacctcctatattatgtttgtggtcacacgcaagttgtctttgtaatcccgttcgattgtctccagcgaaacaatcatgccttcaatcagcaactgagctttttggcgtgcctctggatcaagagattcagggaattcaaaataaaaataacccccgtcctcccctatatcaagaagcggctcgaagcccgcgagcacaatgaccgcgttaacggctccaaacacaacggctgtcactccggcacaaacaagatcttgtccatgttcagcaaaattcgcatggcccgtcatttcaaaagacaatatgcctttatcatgagacctcctgattgttgcctgaatcatgcttacgcgttgattttttcgatcgtcactttagtgtaaggctgacgatgaccttgttttttatgaacgtttttctttggtttgtatctgaaaacagtgatttttttcgcgcggccttgtttttcaactttagccgttactgttgcgccttcaactgtagggttgccgactttcacgttgtctccgccaacaaacaaaacgtcttcaaaagtaactgtttcacctgcttcagcagcaagtttttcgatgtaaacagtttggccttcttcaactttgatttgtttaccgcctgttttaatgattgcgtacattctctgcacctcctattagactaagactcgccagataccagggggctgtaaaagctcttaacacctgtactgagcggttgtagcaatggtgctacatccataacattaaaaaatataccaaaatacaagccgtttgtcaatcagttttagtagggcagaagcagttcctccatggaagaattcgtccgcttatcggcaaagtaagcgtgcagcacttcattctcgtcaagctggctgagcttttggcctgatttttctataataatcggatgcttacagccacgtttgaactcggccatcacatgatagactttatcctccgcctttactgtcagcggcagaagtttctcaagctccctgttttttccgtaatacctttcgaggagaaatctcacatggatatagtgcctttgccgatattcctcaaacaaggaaacagccagaaagacaaacaaaacccatgcgctgatctgcagaggaatcacgaataaaacccagcacccgagcaacaggcagaagcagagcgacgtttttagattaagccggtgagccttttgaaaaggcagctgtttggaaaacaacaaaaataacagttttcctccatccagcggccagatcggcagtaaattgacaaataagatagaaagattataaaaggtgaagagttcaaaggtatgctgatgaatcactgagacttctgcaagcatccaggcggcaaactgaagccagatgtgctgaagagggccggcaataatgaccgcaaactcttcctttaacggccgattcccgtgttcttccacttcgaccgttcccccaaacggcagcaaaaaaacacgcttgattctccaagaaaaaaatacggccagagcagcatgccccagctcatgaatcaatacaatcaggagcagacataataatgctttcatatggcctgtgagcaagcccagcgccgcgataatccaaagaaaaggatgcacatggatctttaagataaggtcgagccatttattcaaatgtaatcacctgaatcggatcaataaatttatcgccgtctttcatggcaaaataatagacccctttattatgatcatcaagcttaatcgaaccgagctttttgcctttatccacaaaatcatataaagcaacatccacatctttgagctcgccatagatactataggtgttgtcagcatgctgcaccttaaccgtcagtcccgtctggctgtctttgctgacttcaaccacatagccttcttttacactatcaatcttatcgctgcttgtttcgactttaattccttccccattgtcctgaaaatcctgctgtactttcccggatgcaggcgcgatcagatctttgcctacttcaatctgctgttccttatttttgtgttcaggagccaggaaagcaagcggatttccgaatttggtttcgaaccaatggcttgctgaagcaaattgaaattcagtttcaaaggttttggctacggcgggtttaatctgactgacgggtccaatgtttgttttataggctatagctgaaacgagaacaaggcaggccgacagaagacatttcaggataattgaatctgttttcaccaatgggtgttttccgttgaatgttggcatgttatcttcgtagaccggaagtgttccatgcttttcctgatccgttaccatcacccaggacgggggtttctgcttttcagaaactgtctgagtagagaaacgttttgagccggaaagctgctttcttcttttctctaatcgttttctgatttcatctgctctgtgactcattgccatcatcctttgcattcgttgggtttgtacatcatatgtcttgtccatggcaaatattcggtttagtcaggaacaaagcaggcaaaaacaaaaaaacctgacacagcatttgctttgtcagattcttctctttaattctatcacattaagatcttacgccgaaaaatgacttaatcttagccatcattcctttattttgctcttcaagcacctgtaaaggaacagattcacctaagatgcggcgggcaatattgcgatatgcaatagaagcgcgatttttcgggtccatcgcaatcggttcaccatggttggaagctttgatgacttcatcatcatcagccacgattcctagcaaatcgatcgacaaatgctgtacgatttcgtcgatatccatcgtgtcaccgtttttcatcaggtgatttctgattctgttaacaacgagccgcggcggttcaatattttcctcttgctccagcagccctataatacggtcagcatcacgaacagctgagatttcaggcgtagtgaccacaatcgctttatcagctccggaaacggcatttttgtacccttgctcgattccggcaggacagtctatgatgacatagtcaaattcctgtttgagctcttggaccatgtttttaatttgttcaggagcaacagctgtcttatcgctcgtttgagcagcgggcattaaatagagcagatcatcgaaacgtttgtcttttacgagcgcctgatgcattttgcatctgccctctacaacgtctaccagatcgtaaataattctattttcaagacccattacaacatcaaggttgcgcagtcctatatcagtatctactaagcatacgcgcttccctaaaatggctaaggcggtaccgaggttcgcagatgttgttgtcttacctactccgccttttcccgaagttattacgatagcctcacccaattcacattcctccctcaagccttgttagatcaggtcttaaatgagccaaatgttgaaggcgttcaatgaccatatttccgtctgtatctaaataagcacattccatttcgttccctttttgaatgtggtctggggagcgatttaacacatgattgattcttaattgtgtcggaagcatttcagaggcggcgatgaccgcttgattatttccattaaacccggcatgcgcgattcctttcagtgagcccagaacaaaaatgttccctccggccctgactgttccgccgggattcacgtcaccgatcaggagcaagtcgccttttacctgcagcacttggcctgaacggacaatttttgaaacagaaataatttcggcttcctctcttatctgctgtgcttcttttttagtaatgacttcactgtcaatagaatgaacaaacaaatctttctttgacgcaatcaattcggttagctgttcctcttgctccttatataaaaagcgatttcccagcttaacatgaacgctgattttctggccttttccatcggtatattgttcaattgacagcatattctgaagaccatcgagaagctcatcaaaagaacacgcatcatccagatgcaatgttagtccattctttgttccttttattgttacatattgctgctttttggtcttcacaatattcacctcaacaacatactcatttcgtcaaaaaaagataaaatcctttttactcatctctcaattctttctttagactcataaaaaacaatctaaatggcagaacaagaataagagctgctgcaatatttaataaaattgtcggtataaaccggtcaagcacaaatccgttaaacgtcataatatctttatgaatcaaagactgaatgccgaatacgtaaaattcgagcagacagacagccagaactgctatcaatatcactacaaatgcgtttgtatgtaacactttaaacgcttttgaagccaaatagcatagccctgcaaaaccaaacatgtaaacgcctaatagacttgtatagttcatgtcatatagaaaaccaaaaataaatccgtaaatcatcgcgtgtttttggttgataaaagccgacatgaatatcaatacaagcatcaaaaaacgcggggcgagcacttggtcatctgtaacgaaaggaaaatgcaccaaatctgtaaaaatgctttccgcagaaaaaacaagcatcataacgaaagggagaaggaaacgtttcacgatccttcctcctctgtatcgacagtcggcacgtcacggttaacaacgatcacattatttaaatctgtaaggtcagccgcaggttttacataagcaacctttgtcagtccataggaatctgactcgatatcagtcacttcaccgattgtcagcccttctgggaaaacaccgcctgtccctgatgtttcaataagatcgccttttttcacgtcttgtttatccttacgctcaataattgtcatcttaagacgttttttctctttgtcatatccttcgatcaagccgtagcctttgctgcctttttttccggaaatttttgtcgcgactctgttattgcggtcagtatcgcttaaaagctgaacagcagacgtaaaattgttaagtccggagcttttgatcttgccgattaatgcgcctttttcgtttgtaacggccatatctttcgctacgttttgctgagtccccttgttaatggtgacctgtttggcccaattatcagggcttctggcgatgaccgttgctaaaatcggcttgtaatctttaatcgatttgacatggccaagctcgtcacgcaaggatttgttttcttcttcaagctcttgaagcttggcttcatattgtgtctgtccgtcaagtttttctcttagacgctcgttttctttgtatgtgttttttaaatcattgatgttctcaaatattcctgcaaaaaattcggcaggcgtatgaaaaatattttgaaatactcccgtcgtatcgccgatcactttctcaggccaggtggtattgcggccgcccttcagcgaaaatccaatcatagccaccaatatgataatacacagaagtaatagcattaaccgcttattcggcatcgtgttacacctcttctattgaactcccgattatctagttttccctttgaaaagatggatgtgctccagtgctttccctgttccgatcgctacacaatcaagcgggtcttcggcgataaggaccggcatttttgtttcttcgctgatgactttgtctaaattgcgcaaaagcgctccgccgccggttaacactatacctctgtccatgatatctgctgcaagctcaggcggtgttttttcgagtgtgctcttcactgcttcgacaattgtagatacagtgtcgcgtagagcattagaaatctcttttcctgtaatttcaattgttttcggcagacctgtgagcaaatcgcgtccgcggatttccatgttgtcggattcttcaggagcttctgcagatccgatttccattttaatcgcttcagccgtacggtcaccgatcatcaggttgtacgtttttctgatgtagttgataattgcgtcgtccatctcatcaccggctacacggattgactgagacgttacgatgcctccgagggaaataatcgcaacttctgtcgtaccgcccccgatatcaacaaccatgcttccagtcggttcccaaactggcagattggctccgattgctgcggcaaaaggctcttcaatcggatacgcgtcacgcgctcccgcctgtcttgtcgcatcgataacagcgcgttcttcaacagctgtaatgcctgatgggacacataccattacatatggttttctggcaaacatgcctttattttttatggcttgattgatgtaatatttcatcatcgtcgccgttgtttcataatcagcgataacgccgtctttcatcgggcgaagagccaccacgttgcccggtgtccgtccaatcatatttttcgcatcatttccgacagcgacaatcgatttcgtatccgtctgcaaagcgacaactgacggctctctcacaacaattccttttccttttacaaaaacaagcgtattcgcagttccaagatctataccaaggtctctagcaccaattccaaacatatgtatgtatcttcctttcttaaagcaaaaataccctaaagggaaaaactcataaactctattatagcttaattcgacgaaaaaaaaagtgttacaaatatcctttttcctttaaactcacaaattttttatccccgatcaccaaatggtcaagcagctcgatgccaatcaggtttccgcattcaaacagccgtcttgtcacttcaatatcctccctgctcggcgtcggatctccagaaggatgattatgaacacagataaaggaagcggcagatcgtttaaacgcttctttaaacacctctcgcgggtggacaatagatgaattcaggcttccgataaatacggtgcgtttatggatgacttgattttttgtatttaagtataaacagacaaaatgctcctgggttaaaaagcgcatatcctccatgacgagattagcgccgtcttccggggagcgaataacgaaatgttcttcgttggctaatttgtgaatccggcttccaagctcaactgcagccagtatttgaatcgcttttaccataccgattcccgggatgcttgacagctcttcaaccgatgcttccttgagcagacgcagcccgtcaaatgagcgcagcagccggtttgacaggtccaaaacagattcgtgtttagtccctgtccgcaataatatagccaaaagttcatgattcgctaagttctcggctccgactttcaggagccgttcccttggcttttctttcattgggaaatctttgagttttaatggcagatcgcgtatgaccaagcactccttttctttcccttcccgtttatagaaccgtcatgcccttatatcaaaatggcgaagagctctcattgtttttgatataggaaggcccatgactgaataataatctccgtctattttctttacaaaaagcgcgcctcttccttggatgccgtatgcacctgctttatccatcggctcttttgtttcaatatatgtccaaatctcttcttcactgagggaccaaaacgcaacttctgtcttatcataaaaagtctcgctgtgattttcagcttgaatgctgaccgcggttattactgagtgacttcggcctgaaagcctccgcagcatagaagcagcttcttcttgatcctgcggtttgccaagacattcgccgtcaaggcataccattgtatcagcaccgataacgattgcatgcgggtggagatcagctacagccttagctttttgttttgccaaccattggacgttttcttctggtgaaaagtttcgatttaatttttcttctacttcactgacaataatggagtagggcagctgtagaagatcgaggagttctttcctgcgcggagattgtgatgccagtattagcggttttgtcatgttcgtcatcctttcagggtttgcttaagaaaaaaagatactcgtttatcctaccaaatcacgaggcttgtcacaatttcagaaaaataactttttcatgacaaaataaaaaaagcctgtcactaaaggacgaaggctcagggcactatctcttattttacgacggctaacagctcctgctgagccttccacccggcttcagcacttggatcctctaattcctttaaagcctgcaaaatcgcttttttctctcctgtttctgacgcttttgtttcaccaagcgacttttctattttctctacactcgcttttgtaatgtcttcgccgagaatcgcctttgctgcaagctccgctgtttccttaaaagaatctgtcatatctgactctattgataaggaaagctccttgcctccccaggcttcaaaatcactgtcgattaaaacctgtcctaactgctgtgagacatccttatcactggctaagcccgcgatgacatacgtatacccgtcatcctttgacagtgacacggcggaatatcctttttcggtcaattgttctgttaacgtttcggcgcccttttcatttgaaaattttccggcttgcacagcgtatgttttgtatgtaccttcagtttgtgcttgtttttctgcgtctgaggtttgtttatcagcagaagtatcccctgcttttgccgtttggctgcctagagaatcctctaaagaggccggtgctgacgcttctttattccccgatatgtttaacgcgaataaccctaatccagtgccaatgacagccgcgaaggcaatcgtcgcagccactctttttactggtttggcagtcccggtctttccttttgcataagactttgtttttttcttttgataaggaggaacaactttagggtcctctttaaacaccttgtccccctcggaatcccaattgaattcatcttcatcagggtgttcctgggatgccgcaacctcttgttctgcctgtcttttttcctcccaatttgaaaatgtcatgcttctatctgcctctgtatcaggtgtctcttgttcgtaaaccgtctcttcttttccattaatcgtcaccttgagggctttttctgcggctttactgttttttttattctttctttttttcaattccgcttcctcccttcatttgcttgaccgttcttgtcggcttttcatgctacacactttagcacaggcaaagaaaaaaagaacaagacttttgtcgccttgtccaaaaaacgttcgtcaaatttttcagcagtcagcccaatgccattttgatataaaaagaaatgatagagtcaccgtataaataggctaaaatgctccctgcggccatagcgggggcgaagggaagcggctgccttttagcgagtctaccagtcagaacagctgccgctccatataatgcacctatcaaaactgaaaagaaaaaggcagctgccagcattttcacaccaagcacaaagccaatcaccgcaaataatttaatatctcctccccctactcccccatgggtgattgcggcaattacagccagaaatagaaatccggctgccgcacctagcaggcctgcataccaggaatcaagcggagaaatcaatctcgcggccgccaaaaagggaagaaagaaaatcaatattcgatttggaatcagcataaaatgaatatctgtcactgcaacaataatgagaagagagataaacaccacagcgggaaacagttccagcgatgtgccaaagcgtattcctgcggcagcaaataaacacgctgtcacaagctctgctgcgggatacataaaagaaatcctatgcccgcagcttttacatttacctttttgaaataggaatgacaggatgggaattaattctgcaggagttaatgtccgccggcaaaacgggcatgatgaacggggcgcaataatagatagatgtaaggggatacggcacccggccgtatagtaaaaagaaccaaggatcagcccaaagataaaaagaatggatagcatagacaacacacctttactcattgagttctggtatggattgtagcaaaatggacatcctgagctccaattgggaatattcaattttacacataaaaaaacggcagaatcttttttttgattctgccgagccggatgcttttatttcaacctttttcgaatgtcagaaataaagtaaagagatccggtaatcagcacaatttcatttgagccctttttgctttctatgaatttgatcacatcgtctggatcttcactccagcttttattgctgatttcacttgcatcatagagatcttttgcaagagaagcacgcgggaaatcaaaagaagcaaaatgcatcgcatgagcaatggtttccagtcttttaatcatgttctgatacggtttgtcctttaacgcgctaaacaccacagaaatgcgtgaattggcgaaacgctgcttcatcgtttccgccagcttttcaacaccttcttcgttatgcgcaccgtctaaatataccggaggatgctcctgaacaagctctaaccgtcccggccaagcagccttcacaagcccgctccttaacgcttcgtcactgatatgggcgatattctccttattgagccactccgcagccaaaatggacaaagcagcattttgtctttgatgggtgccaatcagagatgtccgaatatcttcatagcatttctcttccgttttgaatgaaaactgttctcctgcaggcagagcctcttcattgaaaataacacatgcatcatgcaatgactggaacggcgcagcatgccgttcggcttcatggcggatgacctgtaaagcttccggctgggtaactgctgtaacgattggaataccttctttaataataccggccttttctcctgcaatttcttcaatggtgtttcccaaaatattcatatgatcgtgtccaatgcttgtaatcacagttaagagcggttcaaccacattagtagaatcgaatctaccgcccaaacctgtttcaaaaataacaaaatcgaccttatgaaattctgcaaaatataaaaatgcacaggccgtcataatttcaaattctgtcggctgtccgtattccgtttgatcaagggcttcaacgtgcggtttcatttgattgacgagtgctgtccattcctcatctgaaatcggtatcccgtttacgctgatccgttcattaaacgtaataatataaggcgatgtaaatgttccaaccgtatatccggcttcctgcagcatagaacggataaaagcgacagttgatcctttaccgtttgttcctgcgacgtggaacgctcggatttttttttcaggatgtcctaaccgcgccatcagctgtttcattcggccaagtccgggcttcaccccgaatttcagcctcccgtgaatccagctgcgcgcatcttgatatgcagtaaacaatgataatcccctcttttataagacaaggcggtttctctagaaaccgccccggcttttcattaacccttcagctcagccattcgtttttgaacagcgtcacgcttcgccacataatctttttctttttcacgttcttcatcaattacgtgtgcaggcgcttttttcataaatccttcatttccaagtttcttttggacacgctcaacttcttttgtcagtttatcaaattctttttgcagacgggcaatttcttcatcaatattgattaagccttcaagcggaagaataacctctgctcctgagacaacggccgtcatcgccttatcaacagcctcaatatcggtgccgattttaagcacactcggattcgtaaagcgttcaacatatgaacggttcgcttcgaggcgggctgctatttcgtctgtgcttgttttaatgtacagttcaacctgcttgctcattggcgtattgacttcactgcggatattgcgcacagaacggatcagctcaacaagaagcttcatgtcagctgccgcttcagtatcggtatgctccggcactactacaggccattgacttactgtaatcgattccccttggtgaggaaggtgctgccaaatttcctccgttaagaatggcataaacggatggagcagacgcatcgtttgatcaagtacgtaagcaaggatggaacgggtagttttcttagccgcttcgtcttctccataaagcggaagcttcgccatttcaatataccaatcacagaaatcatcccaaataaagttatataaatggcgtcctacttcaccaaattcatatcgatcagcaagctgggtcacgtgctcgatcgtttcatttaatcgcgttaaaatccacttgtcagcgactgacttttcgcctgagagatcaagctcatcgtacgtcataccatccatattcattaatgcaaaacgggaagcgttccaaattttattggcaaaattccaggtcgattccactttttcatagctgaagcgcagatcctggccaggagagcttccagtcgcaaggaaataacgcagagaatcggctccgtacttgtcaatcacatccatcgggtcgacaccgttgccaagagatttactcattttccggccttgctcgtcacggattaagccgtggattaaaacatctttgaacgggcgctcgcctgtaaattcaatgccttggaaaatcatgcgtgatacccagaagaaaatgatatcgtaccctgtcacgagaacatctgtcggatagtagcgtttaaagtcttcagcagttacatcaggccagcccattgtggagaaaggccatagcgcagaactgaaccatgtatccagtacgtctgtatcctgttcccaattttcgctgtcttccggcgcttcaagcccgacatatagctcgcctgtttctttatgataccaggcaggaatacgatggccccaccacaattgacgggagatacaccagtcgcggatgttttccatccagtgtaaatacgttttttcgaaacggtcaggcacaaagttgaccttttcttctttcttttgcagctcaatcgctgcatcagcaagcggctgcatgcgcacaaaccattgtgtagaaagataaggctccacaacagccccgcttcgttcactatggccgacagagtgcatatgatcctcgatcttgaagagaactcccgcctcctgtaaatctttcacgagctttttgcggcattcaaaacgatccataccttgatattggagcgcattttcattcatcgtgccatcttcattcatgacaaggatgcgttctaaattgtgtcggttgccaagctcgaagtcgttcggatcatgagcaggcgtaattttcacggcaccagacccaaattccatatcaacatagtcatcaccgacaatcggaatttcacgatttacaatcggcaggatcaccgtttttccgataaggtgtttatagcgctcgtcttcagggtgaacggcaacagctgtatcaccgagcattgtttcaggacgtgtcgtcgcaatttcaattgagcctgaaccgtcagcaagcggatagctcatatgatagaatgcgccttgaacatccttgtaaatcacctcaatgtcggatagggctgtttttgtcgctgggtcccagttaataatatattcgcctctgtagatcaggcctttttcataaagcttaacgaatacttctcttaccgctttgctcaagccttcatccagcgtaaaacgttcacgggaataatctaggccaagacctaatttcgcccactggctgcgaataaagtcagcatattcttccttccacttccacgtttcttcgaggaatttttcacggcctaaatcgtagcgggatttgccttcttcacgaagtttcgcctctactttagcctgtgtcgcgatgccggcgtggtccatgccaggaagccacagcacatcatagccctgcatacgtttcattcttgttacaatgtcttgcagcgttgtgtcccatgcgtggccaaggtgaagtcttcctgttacgtttggcggcgggatgacgacagagtatggctcttttgtctggtcactgcccgcttcaaaaaatttgccttttagccaaaaatcatatcggtctttttcaaccgctgccggatcatatttcgtcggcattgtttgttcattcgtttccatcataaccctccagcatgtttaaaaatggctgagaacgaaaaaagagctcttcatccctgtaaaaggacgaaaagctctttcgcggtaccaccttttttcatgaactctatcagttcatgcacttataacggataacgggtgtttcccgaatttctctactcttctttcaagaaattatgctcccgggcgaccttccaatcagacaacataagaagcctttcagcaaacggcttctctctctgcatgcgccttttttgtactcttcccgttctaagcaggtgtatttatcagctcattgtacattatttatgttctttattatagtaaaagtgtttttgattcgtcaatcatcttttccaaaaacaccgctttctatacagatgggcaggcacctattgcccaagtttacatatgatgcttgtaaatgcgtagaggaggatgcaccgtgaagaaacgtttcagctcttattcgctgccgccatgggtaaggcaaattcggcttgtatccgcacaagtgattattcccattacgatttttcaaggaatcagaaccattttctttccgacaacctttgatgttttgctgctcgcaatcctaatctttttagcttgcgcccttcatttagaatggatataaacaaacaagtccgcgccattaagacgtggactcgttttcagcctgaaattttttctcttgttcaatctgatgaattttcatcacaaacggctctatatttttcatttgccaataagcctttaataattgtgtacattcctctttttcatgctgtcgtttcccagtttgataaccgttcagcaccttgtacatggctgccggatatgccatatagctgagaaaaaggctgacttccgcttcacgcaaagggaatgatttcgtatatccataaaaccattcgacgcattccggacaagctttcggaaagcctctgaacatttttgtataaaagccgagcaggtcgttttgcggaggaccgacagatgctctttcgaagtttgtaaaatatccggtcccagcatcattatacagaaaatggtgtatagacaggctgccatggttcattacaacccttgaaacgtccttttcctttgcagactcataccagtcctccagccgttccagcgcaaagttcaccgcggaaatggtttctgaaaaataggttatggcctggagttcaaaaggagaaaggtaccattccttctccgctctatccacaaactgctcatagaaaattttatcttgttcccacttttttttcgtttgcccgtaataacgttcaatctcatcacgtctaacctttagttcctgcgcggttctctcgtgaagacgggctgtttctctaaataaataagcatgtttctgatcccgttcttcctcttggtcaaattggagccaaggcattaaatagtaggtatctccgtattgtatgcctgctgagaaaaactcaccgctatttgttctgtaaacgggaacgaatgaacgaaagcctttttcctcaatcgccaccatatgatctgtaaaatgcttgccgcgaccttctttcaattttttcagggcaaatatgccgtagtctgtatacactttccaaacaagaggactgacaggctcaataaattgagcagtcagtccgtattcctgaagaaccgattgggtatcttccatttcattcaccacattttccgatcacttacggtttacgcatggctatttttatattgaggaatatagagaatctgtcctgcttttaattcatcatccaatgctaaagaattcatcctgatcagctgctgggatgtaatttcataccgttcgcataaacgctcgatcgtatcttcctgctgcacaatacaaattttcattctcgaaaactcatccgcttcttttgtaaagagttttgttaaataaagagaattatcactttcctttgtttgaggttccttcgtttcagcagcaggagcaaccctaggaacagcatccgtttccttcctttcagtctcagaagattcaggcagctggaaggattgaaaaggtgtttcttccttaggctcttcaggtgatggtgtttttctcacttcaatttcgaagctctcttcctcttgttcttcctcctccagcagcttaggcgctgaataaaaagaatcctcctcttcttgttcagacaggaaggtacggtatgccggttcaggcaattcttcttgagatgcctcctccgagcttgttttttgattgaaatggaaatgtaaatcggctttgtcattctccacatatgcagctgaagctgtttctctgctatcttctatggagagagcagcctctgatacactctccaaagcttcatccgcttccgcctcttcttggcaaagcgcaggatcagcctgatccgattgagctgcttcttcattttgagcctcttggcgcagcgcatattcatgattaggagacactgttgtttcctctttttcctttgcaatcacagtctctgaatgaagctcagcttccaaagcaggcgattcttctgctccagcgtgttcacgaggctcagtctctgctggagagtctgcttcttcacgaacatccgctattgcagctgccggctctgccgtttctttttttgctttaacgatctcttgaatctctatttctgaaggatcaggttctggctcagattcttctgtttccgattcagcacgaacctccttttccgcagcaagctcttctgactcttcttcctctttcacatcttctctggcctctggatctgaagcaaccgattcaggcggctcagattctgctttttctgtctccagttcttcacggagccccgctttcgagataaaaagttctggcggttcggctggcggttcatgctgaagaactgcttcctctgccgatgatgcacccggttcttctactacactatgtgccggcggctctgaaagctcttcctccctgaatgccgcaggagcttcatataaaggtatctccggctctttgtcttgcgtatcgtccaaaagcccttcgatcgctaaatcagcttgaattgttaaaatgcgcgaatccgtcaattgatagtcaaatgcgtcaataaagacgaagacatcctgtaaatggctcactttatttttcggaatggtaatatccacaggaaaacagtgagtcagttccgcacttccatcctctctctttctgacttgttcaacaaaccgcttatctgtataaatctcttcggtatgtttgttttgatctatgttgtactcacctgtaagttcaagcgatcctatgattgatacataatcatttacttcctgaaccctaatatcaggatctaatgaaatagaaagcagttcagaaacttcctgtcctttttggaaacagatcgattcttctacagaaaattgcaatcgatgattttgtggcaagttcatatcctcctttcatctaatccttaaaattagatgtcactaaaggtgtatgtatgaactggagaaaatatgagtgggagagcacgaaaaaaccggcacaaggagtccttgataccggttttcactcttatctgcggctgatctcagcaaatactttctcagctgcctggattgtgttttcaatatcttcatcagtatgggccgttgagaggaaaagaccttcgaattgtgatggcggaaggaataccccttcatttgccatccctttataatagcttgcgaacagcttcaaatcagatgatttcgctgtttcataattgatgactggttcgtttgtaaagaagaaaccgatcatcgaacctgcacggttaaaggtatgcggaatgccatgagcctcggcggcttttgaaattccttcttccagcctgtcgccttttttgatgaaattcttgtaggaatcaggtgtcagctgtttcaatgtctctaagccagccgtcatcgcaagcgggttgcctgacaatgtaccagcttgatagatcgggccgcttggagcgatctgctccatgatttctgcctttccgccataagcgccgacaggaagtccgcccccgattacttttcctaaacaagtcagatcaggcgttacgccgaagtagccttgagcgcagttataatcgacccggaagccagtcatcacttcatcaaaaatcagcagggagccgtactgctcagtgatatcacgcagaccctgcaggaaaccttcttgcggcggaacaacacccatatttccggcaactggctctacaatgactcccgcaatgtcttcaccgaattgctggaaagcaagctttacactgtctaaatcattgtacggaacggtgatggtgtttttcgcaatgccttcaggcacccccgggctgtcaggcagaccgagagtggcaacacctgaaccagctttaatcaagagagaatcgccgtgtccgtggtagcagccctcaaattttaaaatcttgttgcggcccgtatagccccttgccaaacggagggcactcattgtagcctctgttccggagcttaccattcggacgatttctacagatggcacacgatcaatgacgagcttagcaagttcattttctacttcagtcggagcaccgaagcttgtcccgtattcagccactgttttgaggctttctacgacgcggtcatttgtatgccctaaaattaaaggcccccatgacaagacgtagtcaatatattcattcccgtcaatatcaaagattttcgagccttttccgcgctccataaaaatcgggtccatgtctaccgatttaaatgcgcgaacgggactgttcacaccgcccggcatgagtttttgcgcttctttaaaagccgtttttgatttttcatagcttctcatctgcctcaactcctgtcaactgaataaaattactccgcaagccatttcgctgcgtctttcgcatgatacgtaataatcaggtcggcacccgcgcgcttcatgcttgtcaaaatttccaacacaatttctttttctttgatccagccgttctgcgctgcagccttcaccattgaatactctccgcttacattataagcgacgagcggcaaagtaaactcattttttacgtcacgcatgatatccatataagaaagcgaaggtttgacaatcaaaaagtccgcgccttcctcgacatctgattgtgcttcgcggagtgcctccatacggttggcagggtccatctgatatgttttgcggtctccgaattgcggtgtgctgtttgctgcatcacggaacggaccgtaaaactcacttgaatatttaacagcgtaagacatgatgggaatattgacgaatccttctttatcaagtgcttctctgatcactgtaacaaatccgtccatcatgtttgatggcgcaatgatatccgcacctgctttcgcttggctgacagctgtctgcgccaaaagttccagcgattcatcattgaggatgaccccgtctttgacaagtccgcaatggccgtggtctgtatattcgcacaggcacgtgtcagcgacaacaaccatttcagggaagtgttctttaatttctgtgatggctttttggacaattccgtgatcatggtacgcttgtgttccgcaatcatctttttcttccgggatgccgaacacgataacagattgaatgcccagtttgaccagctccgctacttcatccttcaataaatctaatgatacatggtaaacatcaggcattgacggaacagcttttttgccttccagcccttcaacgacaaaaatcggataaataaaatctgatggatgcaaacgtgtttcctttaccatttctctcattgcttttgatgtccgcaggcggcgatgtctattaaatgattgactcatattctctcttcctctcttgacatgctgcacattaattcaagcatgccatctattgtaaatgtatcaggcgtatgcgatgtgatgccgtacgtcagaagggcatcatttgttaaaggcccaatgctgatacaggccgtcccattcgccttccacttttttaattcttctcccaagacatgcataaacgtatgtacggttgatgaactcgtaaatgttacatagtcaaaggaatattgacccgcagcgtctttcagtgcctcaatgccttcttcatccggaatcgtttcgtagagaacccattcctttacttcaaaaccgagcgggacaagctcttgttttatcacatcacgtgacaaattccctttcatcacggtaatgggctcccccggttcagcatgctgcttaagagcgtcagccaattgttcagcaatatactcctgtggcatcacatcaaccgatacgttatgcgtttttaaacggcgggcggttttttcaccgacggctgcaatttttttatgcgcagggagaataagctgattttccttcagataagaaaaaaagaagtctgccccgttcacacttgtaaaaacaagccagcctggcgcggcaagatcctctcttacctgttccgcaacatcattcggcaaagcgcggcgaaacgtaatcaaagaggttaaaaccgctttaccgccaagcgcctccactttttgctgaaatgatgttgcctgtgccttattccgggtaacaagcactgtttttcctttcaacggaaaatcattttccatcctcatcaagctcccgttttacacgatcaattaaatcttttgctcctttgtcagccataagagcggcacagcgctttcctacttcctccggatcgtttccggtgacggtttctttaaaaatgattttgccgtcaggtgaagcgacaagacctgtcatttcaatttcatcctgtccatttaacacggagtagcctgcgatcggaacctggcagccgccctccatcgcgtttaaaaaagcacgttccgctaagacagtccgttttgtatattcatctgtaaactgagaaaacaacgccaacagctcttcatccgattctcggcactcaatcgccagtgctccctgccccacagcaggcaaacagcgctcaggctcaaggaattcggttacgacatcttgcttccaacccattctagaaaggccggcagccgctaaaataattgcgtcataatcctctgtttccagcttttgaagtcttgtatctatattacctctaatccatttaattgtaaggtcagggcgctcaatcaaaagctgcgcgcttcttcttaaactgcttgtgccaacgacagcaccttccttcatttctgaaagctttacgcgattctttgaaataagggcatcacgcgggtcctcccgttcaggaatacagccgatcacaagaccttcaggcaaaacagcaggcatgtccttcatgctgtgcactgccatatcaatctcttcgtttaaaagcgcctgttcaatttctttgacaaacagcccttttccacccacttttgagagtgtaacatctacaatccggtcgccctttgtcacgatctctttaatttcaaaagcaaacgaaggattgatttccttcagtttttgaataacccattttgtttgagtcatagcgagtttgctccgtctggaacctactttaatcgttctcatcatttctttcctcccgaatctgcttgggacatcgtttaactgaaccaatggaattgcgacaggcttccaagcaggaaataattgatcatcagcaccagaaaacaagccgtattccacagtgctgcgacctttccttgcagctctttaatcagcctgatataaagataatagctgtacagcagcaggacgacaaacgaaccaagcactttggcgtcaaaccaatacagcgtttctagtgagacatacgcccaaatgacgccgagaatcaaactcagcagcagcatcggaaccccaatgacatttaaaacatacgccatataatcaagcttagataaatcttctattctcaacagccattttccccactttttctttttcagcagatgatattgaaacatatatagcacagaaaaaacgaaagaaagggaaaaagcgccgtatgaaagaatcgccattgtaatatgaatcaccaaaagctcggatacaagctgcccggaaaaagcagctgactgctgctctgtcggtgaaaatgtgtgaatggcgatcatagaaaatcctataacatttgtaaaaaacacgataaagtcaacacgtaaaagctttgtcagtacaagtgacagcgtgacaagcacccaggcataaaaataaagcgcctccgtcacatttaataccggaaaccgccccgtcacccacataaaataggccaaatacacggtttgcagagtccagacaatagaaagcaaccagaaggccatttttccagccttccggttgtgttgaagaaaatctataaaataaaagagtacacttaacgcgtaaatgacgattgtcccctcattaagtcttgccattgcagtatcaatcattcagctttcactcacttacaagtgggctaaagcccgcttttgattcagccttcttaaaagagtggaccttctggctgctttccacggttttcatcatttgacggcccgcagcttcttcaatatcaaaaatctgcataaacaacgcgagcttttcttcagaatcagcatctgccgcaagctctttcacctttaaaatcggatcacgaagcatttggttaataatacttttggtgtgtttgttcaacagttttttctctcttgtgcttaagtgaggcagcttacgctcaatgctgtccatcgtttctgactggatagcaagcgccttttcgcgcaatgcagaaataaccggcacaacaccaagtgtattcatccattgtttaaattccacaatggtttcttcaattaacagttcaactttttcagctgtttctctccgctctttcatgttcgcttctacaatgccttccagatcgtcgatatcataaagaaaaacaccttcaagatcattcagcgccggatcaagatctctaggcacggcaatgtcgaccataaacagcggacgtcccttgcgaagcttattcgcgttttccatcatctctttggacacgacaaattcacttgcaccggttgaactgattaaaatatcagcctccgcaagcgcgctttcaagctgattcaagcttctcgcttcacctgagaaacggtctgcaagctccttcgctttcaagtatgttcggttaatgacagtgaccttgccgattccctgtccgtgcaggttttccgcagcaagctcgcccatttttcccgcaccgagaatcaatatgtgcttgcttgaaagatttccgaagatttttttagcaagttcaactgcagcatagcttactgacaccgcatttgagccaatgtctgtttcggcgtgagtccgtttgcccactgtaaccgcctgcttaaacagctcattaaaaatagtcccgatcgttttttcttgctgagctgttttaaagctgtcgcgtacctgtccgagaatctgcgtttcgccaatcaccatagaatcaagtccgcaggctacacggaataaatgctcaacagcggcatcgctctcataaaacgttaagaacggtgacagctcttctttgcttaattgaaaccaatcagctaaaaacttttttatataataacggccggtatggagctggtcgactaccgcataaatttcagtgcggttgcaggttgagacaatgatgttttcaagaatgcttttctcttctttcagctgcaccattgcttctgccagctcattcggctgaaaacttactttttcacgtatctcaataggggcggatttataatctactcccacaacaagtatatgcatcgctctaattacacccccaacgcccaatcttaatttataatcattctaacatagaactcattatttataataattataacatagtttctttcacaaaatgtgaacagattttaaaattcttatgctatattagaaaaagcttcagggaaaagaagcattcctattgacaataccaaaaacagcagaaatttactacacatcagctctaaaaaacaagaaggtgatatgcatgaaacaaaaatcaattttattcccttgcctgctgcttgccgcttctgtatatgcatggcttgaaagcggccaagctgaactgttttcgggacaggatcaatggcctgttctcctcatgctgttaggagcagcctttgtatatcaaggaaaaaaagaagccgttgcaccccatttctttatcggtttgcttctcttcgggatcggtttacacttttttgccaagccgaaatgggtatggtggccggatgattttgaaatgcttctctttatgatcggcttctcactactcgtttcaaccgttcaaaaaaaagaatatgtatatgaagctgtgtcgatgatttgtttttccctgtttttgtactttttcaaacaaattatggcatggcttgagtctgcgcatattccaacagcgcttctgaaggagtattggccgtttgtctttattggaatcagtttattgttattattgataaaacgaaaaaaatctatacgataaataaaaccggtagaggatcctctaccggtttatcatttttttgatcgctccccaagcttcgtcttttccctttttcgtttctgaggaaaagagaatcagctcgtcttccggatcaatatttaatgtttgtcggacaaccttcgcgtgtttgtcccatttgcctttcgggatcttatccgcctttgtagcgataacaataacaggaatgccgtaatactttaagaattcatacatctgtacatcatcattagatggcgcatgccgcaaatcaacgatctgcaccacagcttttaattcctcgcgtgtcgtgatataggtttcaatcattctcccccatgcttcacgctcagactttgacactttggcaaaaccgtagcccggcacatccacaaaatgcaactcatcattgataatgtagaaattaagtgtttgtgtttttcccggctttgatgacgttctcgcaagatttttgcgattgattaatgaattgataaaagacgattttcctacgttcgatcttccggccaatgcgatttccggaagccccccttcagggtactgttccggttttactgcactgatcacgatttctgactttgtgactttcatttcttctctcctactaaggcatgttccaaaacctcgtctaagtgggacgccaatataaatgtcagcccctccctgacgctttccggaatatcctctatatctttttcattatctttaggcgcaataatggtcgttaatcccgctctatgtgcgccaagcgctttttcctttaagccgccgatcggcagcacgcgcccgcgaagcgtgatttccccagtcatgccgacttcacgcgaaaccgcccgtcccgttaaagcagaaacaagcgctgttgccatcgtaataccggctgacggaccatcttttggcaccgcaccctctggtacatgtatatgaatatcatacttctcatgaaagtcaggttcaatgccaagttcttctgttttggatcgcacatagctgaatgcagcctgagcagactctctcataacatctccgagctttcctgtcaggattaatttccctttccccggagaaagcgatacttcaatcgacagcgtatctccgccaacggttgtataagcaagccctgtcactacaccaacctgatcctctgtctcagcttgtccatatctgaaaatacgttttccgataaagtcttgaaggttcttctcagtaaccgtaatccgttttcgctcttcagcaacaatggcttttgcagctttacggcaaatcgcggcaagctggcgttcaaggcttctcacaccagcttctctcgtatagtagcggataatatcaagaatcgcctgatcacgcagctgcaggttgcttttcttcagcccgtgttctttgatttgctttggaagcaagtgatcctttacgatttcaagtttttctatttctgtgtagcctgcgatattaataatttccattctgtctctgagcgggcccgggattgtggccaaattgttcgccgttgcgataaacagcactttggataaatcaaaggtttcttcaatatagtgatcactgaagctgctgttttgctctggatcaagcacttcaagcatagcggatgatgggtctcctctaaaatcagatgacattttgtcaatttcgtctaataagaagaccggattcagcttgcccgcttttttcatcccttgaataatacgtccaggcattgctccgacataggtccgtctgtgtccgcgtatctctgattcatcccgtactcctccgagtgagattctgacgaatttgcgtcccaagctttttgcaattgatttggctaaagacgtttttccgacacctggaggtcctgccaaacagagaatcgggcctttcagggatttggtcagcttctggacagccaaatattctaaaatacgttcttttactttttcaagcccgtggtgctcttcgtccaagagacgtcctgcttctttcaaatcaagcttatcatctgtttcatccgtccacggaagagcaaccagccagtcgatatagttgcggatcacagagctttccgcagaacttgacggaattttttcatatctgttcaattctttaagcgctgtttctttcacatgatcaggcatgcctgcttcttcgattttttccgtcagcgtctgaacttcgccagttttgccttctttatcgccaagctctttttggatcgccttcatttgttcacgcaagtagtattccttctgcgtacgctccatcgaacgtttgacgcgctgaccgatttttttctcaatctccagcacttctttttcattattaataaaatcaatgaccttgttcagcctgtctttgacatcagccgtttctaaaatatcctgcttatcctttagtttaaggggcagatgagaagcaacgatgtctgccattctccccggctcttcgatatcagtaaccgcagcgtacgtttcggccgagatttttttagaaatttttatgtactgatcaaagtggtctagcaaagtccgcatcaatgcttcgtcttctgtatcttttgaatcatcttcatgaataagttgaatgtcaaccgacgtgtaatcctcgtgttcattgtatttgacgatatgggcgcgcttgaggccctccaccaacacacgaatcgtaccgttcggaagcttcagcatttgcttaatttttgtataggtgccgacagtgaaaatctcgtcttcaccaggttcgtctatcgaaatatcctgctgagtggctaaaaatatcatatgatcatgcatcattgcctgttcaagagcctgaaccgacttgtcacgtcctacatctaaatgcaaaaccatcgtcgggtacactaataaacctcttaaagggaggagcgggatgctgcgttttaattcttctgccatgtgactgacacctccgtgactttagtatgaaccattataatacaactttttcatccttgtacaataaacggcatggttccattttctataaaacagtctcctcgtagtataccctttctttctgatatgaaaaaggaaaagatgtccttcatgaaaaaaaccctattatcaaaatagggtttaaacggattctttattgatttcgatatgaaacggtttttgttccgttggcggattcaccaaaatttcatcaagcacttcttggaacgtcttcactgcaataatctcgatcccgtcaatctgctttaagatggcctgctgattttcatatgggataatcacctttttcgcaccggactgcttggccgcttttattttcggaatgacgcctccgatgggtttcacaagaccgttcaggctgatttcgcccgtcatcgcaacggtattgtcaataggaattttgtgtatcgccgagaaaatccccgccgccatcgcaatgcctgctgacggcccatcaatcggaatccctcctgggaaattgatgtgaatatcataatcagaaggcttcattcccattgtccggagcacggttaatacattttcaaccgaacccttcgccatgctttttcgcctgatcgattttgattggctgccgatgctttcttcttcagctattcctgtgatgttaattgatcctttatcttgagccgcggttacacttacttcgatttccagaagcgatccgctgttaggcccatagactgcaagcccatttacaatgccaacctgtggttcaacaccgattttttgctcgtgctttggagtaagctgactggagtgaatgacccattcaatatcctcaatcgtaatgtcctttcgattctccgttacagccatccccgctgcgatttgaatcatattgacggcttcccgcccgttccgcgtgtagctggtcaaaagatccagtccttcttcggagataattttttcaattttatccgctgctgttttggcaaccgttttcaactcgtccttttcaagctcgcggaaaaaaacctccaaacagcgggaccggatagctggcggaatttcgtttggcattctcgtggtcgcgccaatcaagcgaaaatcagccggcagcccattttgaaaaatatcatgaatatgattcggaatttgtgtattttcctcactgtaatacgcactatctaaaaagacttttctgtcctcaagcaccttcagcattttattcatttgaataggatgcagctcccctatttcatcaataaacagcacaccgccatgggcatgggtgacagctccctgcttcggctgcggaatcccagcctgtcccatcgctccggccccttggtatatcgggtcatggacagagccgatgagtggatcggcaattcctctttcatcaaaacgggctgttgtcgcatcgagttccacaaagacagcctgctctttaaacggtgattgtttatgtttttttgcttcttccaacacaagccgcgcagcagccgttttcccaactcccggtggcccatagacaatcacatgctgaggatttggcccgcataaagccgcctttaatgctttaatgccgtcttcctgtccgacgatatctttaaagcttttggggcggaccttctcagataatggctcggacaagctgatagcgcgcattttccgaagctgctccatttccttctttgattctttatctatcgtgaccttttgtgtcctttgatttttaagcaaattccaaaaatacaaaccgatgatgatcccaaaaaacagctgaataaataacgcgatccctgtccaactcatggtggtccctcctgaaaaacaatttatgtatccaattcattcctctgattgctagtatctcccatagaagacgggaataaacgtttttccggaagagttgcatgcaaaaaaacctcctgagtgttaccactcaggaggtttgtgcttatctttatgcagatgttttatcttggcttacctcagtgccgtcttttaataagaggcgaggaggctctccgtgtgtcacagttgccccggtgattacacatttttcaatgtcatcacgagaaggcagctcaaacatcacatcaagcatgatgccttcaatgatggaacggagtccgcgtgctccagtcttgcgttcaattgcttttttagcaatttcagaaagcgcttcttcttcaaactcaagctcaacgttgtcaagctcaagcattttcttgaattgcttaactagagcgtttttcggttttgttaagatcgcaaccaatgcttcttcgtcaagcttttcaaggcttgcaataaccggaagacgtccgataaattcaggaattaacccgaaacggagcaaatcttcaggaagcacttttgaaagaagatcttctttctcaagatcagcagctttattgtcggcaccgaatccaatcactttttggcctaaacggcgtttgatgatttgttcgataccatcgaaagctccgccgcaaatgaacaaaatatttgttgtgtcaatttgaatgaattcttgatgaggatgcttacgtcccccttgaggcggcacgcttgccactgtaccctcaagaattttaagcaatgcctgctgtacaccctcacctgacacatcacgtgtgatagacgggttttcagattttctagccactttatcgatttcatcaatatagataatgcctttttcggctttttccacatcataatcagcagcttggatgagcttcaagagaatattctctacatcttcacccacgtatccagcttcagtcaaagatgtagcgtctgcaattgcaaacggcacatttaaaatgcgagccaatgtttgcgccagaagggttttaccgcttcccgtagggccgattaatgaaatattactttttgagagctcaacatcatcaactttgctgttagagttaatgcgcttatagtggttatacacagcaacagcaagtgatttcttcgcttgatcttggccgatgacatattcattcaaaatttcgcgaatttcctgaggctttggtacgtctttaaattctacttcttcttctgttccgagttcttcctctacaatttcagtgcagagttcgatacattcgtcacatatatatacaccaggtccagctacaagcttacgaacctgatcttgtgtttttccacagaacgagcattttaattgtcctttttcctcgttaaatttaaacattctttcaccccttaatcttgtctcactttttcttttaccggcagagcaaaagaaaatgattcttgaaacgaacgagtatgtattgcattttaccatactttccaaaaagacggtaacaatgtgtttctgacttgcacattctatatgtatgacaaaaaacagccctgcattaactatattgccccaagaaaaagagataactcataattgtacaaaacaaggcacgaatgattcgcgccctgttttattagtactattattatgcaccatattaacggttttctacaagaaaatcaattgctttgcgaacttttaaatcttctttcatcgcgtcagtagaaccgatggcttgtttaatattttcaacaggcatgttgtatgcttcagccattttagtaagctcagcatcaacttcctcatctgatacttcaaggttttccgctttcgcaatcgcctcaagagtcaggttagattttacgcgtttttcagcatcttctttcatttgctctttaagcgcagcttcatcttggcctgagaattgagtgtaaagctcaaggttcatgccttgcatttgcagacgctgttcgaattctttcagcatgcggtcaagctcagtgtcgaccattgcttgcggaacatcgatttcagcattttcagaagctttcagaacaagctcttcacgcaatttagcgtcagcttcgttttcttttgcttcttctaaacgtttctttgttttttcagttaattcagcaagtgtttccacttcttcatcgatatcttttgcgaattcatcgtcaagctcaggaagctctttcgctttgatttcgtgaattttcactttaaacacagctggtttgcctgcaagatcttcagcgtggtactcctcagggaatgtcacttcaacatccttctcagcacctgcttcaaggccaactaattgatcttcgaagccagggatgaatgagccagaacctacttctagagagtagttttcagcttttccgccttcgaaagcttcgccgtcaacgaatccttcgaaatcaagaacaactgtgtttccttcttcaacagcgccttcttcttttacaacaagctcagcttgacgctcttgaagggcttttagttcgttttgaacatcttcgtcagttacagttgtgtcgtctttttcaatgcccaggcctttgtattcgccaagcttcacttcaggttttactgttactttcgcagtgaagattaagctttcgcctttttcgattttttcaacatcgatttcaggacggtctacaggctcgattccagcttcttcaaccgctttagggtattctacaggaagaagaatatccaaagcatcttggtaaagagcttctacgccaaagcgctgttcgaataatccgcgaggaattttacctttacggaatccaggaattgaaacttgttttactacttttttaaatgcatcatcaagtgctgttttaaacgtttcagcatcaacttcaaccgttaaaacgccttcgttgccttcttgtttttcccattttacagacatgtgtttccctccaaaaatctattcaggttgtgtcggtcttccattctaaagcaatcattcggcttcgtccaacaaaaacaaagctgccaaagatcagaatcattatgtatagatgttaataatgaactgcaaagcctgtccaaccgtatttcttataacccgttatacacaaatacaaccactatattataacataacacatagcgctttcaactatatggcgcgatttacaaataagaaatttcttcaatatcttttaacattgtgcaagcttcatcgagttctctgtcggtaaattcatacatcatatgaagttcttctctttcaatttcaattccgtgcatctcgtaaccgactttatgcagggcagccgcccaaaggtcagccgacagcaatttcggctggaacggatataaaacgtacaaatgtcttctccacaattcttctactgccgcgtataaggttggattttcatttccaagtgtttcatccagcaccctgagaacacggtgcagaatcggcgcggcatcaggcggaacaatctcagacggttcaattgtcaacgactcgccaaatttactaatgtgtacaggtttactgtactcatgctcagctaacagcatgacaatcatcgttttgataatcggatgggctgaggggtcttggaggattgttttgagcaatcctgtatactttgctacgttacggtcttttaaggaatggatgagattcatttgctcctcagggcttgccagcactttctcggtgtcaattgtatcctcatattcttcggcccaagcctcgtcctcacgatctggatcggtcattttccggctgaaatccagcagcttataaaattgctcggcgctttctgccggcagctgattttcttccaaaacggcttcaatggtgcttttgacttcttcgtattttttgagctgaattaagatggtcatgtacacctgcaaaaccgtaaaataatggccataaccttctttgagcatcttctcgcacacgctttctgcctcttccagctcgcccagctctaaaaagcagatggccatccctaagtgaagatcggattcagtatcatcatatttcatcgcttctgaaaacagttcaagcgcttcttgatactttttttccttgagtgatgacatccctttttccacaaggcggtctttcagatgaggaaaaggaataatttttgcgtttttcttgtcatgcgtcatacctatattcctttcaggcatttattttgttcaagtgtatcaacacctgtgaacaaacacaagaaatgaaaggtttcaccaggcaaaaaaagccgccggacaaataccggccgctttttcagtcttgaagccaagagcttctttgtgattcaaattgcttgatttcatcttccagcagcagcgttaatgaaatttcatcatatccgttgatcagcatctctttccaatgcgggtcaacttcaaatgaaatttgattgccttcactgtcatgaatcagctgattttcaaggtcaacagtcatttgcaatgacttgttttcatactggccgacaagctgtttccaattgtcatatggcatgcggatcggaagcatgccgtttttaaagcagttctgatgaaaaatatcagcaaatgacggcgcaatgataattttaaacccataatcatcaagtgcccacggagcgtgttcacgcgatgacccgcagccgaagttttctcctgctattaaaatggaagctccttgataaacaggctggtttaattcaaattcagggttcggttcaccattcgcatcatatctccagtcaaagaatgcaaaacgcccgtagcctgttctttcaatcctcttcaaaaattgcttaggaataatctggtctgtatccacattgatccgatttaatacggctgctttccccgtatgtgatttcaaaggttccatctcgcgcactccttacacaactgttttttcctgataaaactttctgacatcaacgaagtgtccgtgaatggcagccatcgcagccattgccgggctgacgagatgtgttcttgcaccttttccttgtctgccctcgaagttgcggttagaggttgatgcacagcgctctccctcaggaacaacatcattattcatactcaaacacatgctgcagcctgactctctccattcaaatccagcttccaagaaaatctggtcaagcccttctttttcagcctgaagcttcacgctttgagatccgggcacgacgatggcccttacgctgtcagctaccttcttccctttgatcatatcagcagcctgtcgaaggtcagtcatgcgggaattcgtgcaggaaccgataaatacgtgctccactttaatgtcttcaattttttggtgaggagtcagtcccatatattcataagcgcgaatcgcttcttttttatcatcttctgcagaaaagctttccggcgcaggaacttcagaatcgacaggaagaaccattcccgggttaatgccccatgtcaccataggggaaattttgttgccgtcaaggaagatagatttatcataaacagcgcccgggtctgtgcgcagcgccctccattcctctacggccttgtcaaattcttcgccttttggcgtgtacttgcggtttttgcaatattcaaacgtcacctcgtcaggtgcaatcaaacctgctcttgctcctgcttcaattgacatgttacaaacagtcattcgttcatccatcgtcatatttctgaatacttccccagtgtattcaatgacgtagcctgtgccgaatttcacaccgtatttgccgatgacagaaaggatgacatcctttgccgttacccctttttgaagcgttccatctacgcgcacttcaagtgtttttggacgctgctgccaaagtgtctgtgtggaaaggacatgttcaacttcactcgtcccgattccaaatgcaagagcgccgaaagcgccatgtgttgatgtatgactgtcaccgcacacaatcgttttccctggaagcgttaagcccagttcagggccgacgacatggacaatcccttgatccacactgtgaagatcggcaaggcgcacgccaaattcctcacagtttctttcaagcgccgttacttggcgtttcgcaacttcatcctttatctcaaaacgattgacagtcgggatgttgtggtccattgtcgcaaatgtattttggggtcttctgacctttcttcccttttgtctcaaaccttcaaatgcctgaggagacgtcacctcatgaatgaggtgcaaatcaatatagagaagatccggctttccctcaccatgttttacaatatgctgatcccaaatcttttcgatgattgttcgaggcatcatcttttatttcctccctctacctagagctaagaccgcttaacgtaagctgtcacacattagaaattgtattttcactcatgattgctgccttaacttcctctgtaatggcctgagtgctgctgaactcttcaccccgtgccaaatcttttgttcttttcccagaagccaagactttgtttaccgcatcttctacagctttcgcttcctcttcaagcccgaaagatgttctcaaaagcattgccgctgacaatatggctgcgaacggatttgccatccctttaccggcaatatcaggcgcggagccatgaacaggttcaaacagatgaagaccagagcttgataggctggctgacgggagcattccgagcgagcctgtaagcatggacgcttcatcgcttaaaatatcaccgaacatattttcagtcaccacgacatcaaattgattcggtgcataaattagctgcatggccgcgttatccacaagcatgtgctcaagcttcacatcaggaaactcttgtgcaacgtcctcagccacttcacgccacagccggcttgattcaagaacattcgctttatctacagaggtcactttgccttttctggctgccgccattttgaagccctctctgatcactcgttcaatttccgttctcttataaaacagtgtatctactgcttcctgctcaccttcagtgtttacataacgtttgctcggctggccgaaatacaagccgcctgtgagctcacgaacgataacgaaatcaacattatctatatattcttttttcaaaggcgaagcgtcagaaaggctttcaaataccttcacaggccgcaaattcgcaaacaaatcaagctgttttctgatgctgagcagccctttttccggtctcagttccgaaggattttgatcccatttcggtccgccgacagcgccaagcaatatcgcgtctgcatttttacaagcagcaacggtttcctccgggagggggttatgatgttcatcaatagccgcccctccaatcaggccatattcaaattcaaattcatggttaaagcgttcggcaacacttttcagtacgtctgtcgctgattctaatacttcagggccgatcccgtctccgggcaatagagcaatacgtttcttcaagttaaccgttctcctttcttttatgatccgacagctgtgtggtttttcaatccgctcatattcgactggaaaaccaattgacggttgactgcgttcaaataggctttcgctgatgcttctaatacgtcttgcgctatgccccgacctgctgattcttttccgttcaccaaaactcttacatacacctgggcaaatgcatcttcgccttttctgttagactgaatgcggtagtctaagagctccacgtccttatcgatgcagcgctcaagcgtattgtagattgcttccacacttccagctccagttgcagcttcctgaataagctctgcgttttcttgatttttcaacgaaagagtagccgtagggacctgacttgttccgtaatgtacttgcagagaaagaaattcatacccaatcttgcgatctgttactttttcttctaaaataagagaaacaagatcctcatcagtgatttcttttttcttctcagtcaactctttgaacatcgtaaagaatttattaatctcttcactgtcaaattggaatcctaaagcagtcagccggtctttaaatgcgtggcgtccggaatgtttacctaggacaagcgcatctgcggttacgccgacaagctccggtgaaataatttcataagtcgatttttcctttaaaaagccgtcctgatggatgcctgattcatgagcaaatgcattatctccaacaaccgctttgttgcgcgggacagccatgcctgtcagtttgcttactaaatcacttgttctcttaatctcgttcagtgtaatacctgtttcgacttggtagaaatcttttctggtatgaagggctacagcaatttcctctaatgccgcgtttccggctctttcaccgatcccgttcacagcgcattcgatttgatcagcgccattttcaatcgcagcaagagagtttgcgactgccattcccaaatcatcatgacagtgggctgaaagctttgctttgtgaatgttcggaacgttttctttcatatatttaaagatatttccgtattccgccggggccaggtagccgacagtgtccggaagattgataacactggcgcctgcgtcaatcactttttcgacgatttctgctagaaacggcagttcagtgcggcaggcatcttcagctgaccattgcacaatcggaaaacgttcttttgcgtatttcaccatttcaaccgctctttcaatgacttgctcacgtgtcattttcagcttgtgcttcaaatgaatgtccgatgtggcgataaaaacatgaattctcgggtgagaaccttcttttaacgcttcccaagcagcatcaatatcaccttttacacaacgggccagaccagttactgaacaatttttaatggttcttgcgatttcctgaacagctaaaaagtcacctcgggacgaagcgggaaatcccgcttcaatgatatctgccccgagtctttcgagctgcttagctatggcaagtttctcctgtgtattcaagttcactccaggggactgttcaccatcacgaagcgtcgtatcgaaaaaattaattttgcgcaacggagaccaccgcttccttcttcttgccttgtttcacaaacggcatcatttcacgaagctttcttcccactacttcgatttgatgttcgttctcgcttgcattgatagcattgaaacgaggacggtttacttggttttcgacgatccactcttttgcgaatgtaccgttttggatatcttttaatacttctttcatagattcttttactttagcgtccacaacgcgaggacctgatacgaaatctccccactgtgctgtgtcagagattgaatatctcattcctgcaagtccttcttcgtacataaggtctacgattaatttcagctcatgaaggcactcgaagtatgcaagttcaggctgataacctgcttcagttaatgtttcaaatccggctttgacaagcgcgcttaatccgccgcaaagaactgcttgctcaccgaacaaatctgtttctgtttcttctttaaatgtcgtttctaatacgcccgctcttgcgccgccgattcctttagcataagcgagggctttgtctcttgcttctccagtcacatcttgatagattgcgaacaatgccggtacgccagctccttgctcatatgttcttcttaccaagtgtcccgggcctttaggggccactaagaatacatctacatccgccggaggaacaatttgatggaaatgcacgttaaatccatgagcaaatactaatgattttcctgctgtcaattcatctttgatttcagcttcgtatactttttgctgttgctcatccggaagcagaaccatgatgatttcggcttgggctgccgcttcttttactgaaaatactttatgtccgtcttcttgggcttgagtgaaagattttccttgtctaacaccgacgatcacgtctactccgctttctttaaggttcagggcatgtgcgtggccttgcgaaccgtacccgataaccgctactgtttttccagccaatacgttctctttgatatcaccgttataatatacttttaccattttaatctctcccttgttatgttttatacaatagatattgttttattggatgacgccttttgctgggttcccctcgcaaaagccgttgtacctgttctcgcgatttctttaatgccataaggttttaataactcaataagcgcttcaattttgttagattcacccgtcacctgaacaacgatgctgtctctgctgacatcaacgacagaggctctaaacggttctatgattccattaatctctgttctcgttgaaggtgcggagacaaccttgattaaggccagctccctctggacaatcgattgatttgtgatgtccgtgactttcagcacatcaatctgtttgttgagctgtttcgttaactgttcaacatcattttctccttcaacgtgaacgacgaaggtgattctggaaacgccggctgtttctgtgtgcccaactgtaatgctttcaatgttgtaatgcctttttgtgaatagaccggtgatccggtttaacaccccggagcggttcaccacagtcaatgtgataattcttttcaaggtttcacccccaccatttcatgcagccctttccccggagccaccatcgggaatactttttcttcgctggcaacccgcacatcaatgacaacaggttctcttgatgttaatgcctcttccagcttttcctttgcttccgcttctgatgaaattctgatgcctttaatgccgtatgcttcggacaatttgacgaagtcaggctgagaagcgaatttagattctgaataacgttcttcatagaaaatttcctgccactgtctgaccattccgagacaagcgttatttaaaatcactaccttgaccggaagatttaattcgcgaataacatcgagttcttggagcgtcatttggaatccgccgtctccgacaaccgcgacaacagtagcatctttttcggccagctgtgcgccgatcgccgccggaagaccgaatcccatcgttccaagtccgcctgacgtgacccatttatctgctttttggaacggataaaattgcgctgaccacatttgatgctggcctacatctgttgcgacaatggcctctccttttgtaaattgatgaatatattcaatcaatttctgaggtttaaaaccttcttcttcattatctacataccagagcggatactcttctttccattcagcgagctgttttttccattcgcttgaatcgctttgtttgccgtcttgtttgatcagctcctgcaggacaattttgctgtctccgactacaggaatctgtgttttcatgatttttccgatttcagctggatcaatatcgatgtgggctatctttgcgtttctggcaaagtgtttcaggtttcctgtgacacggtcatcaaaacgggcgccgatactgattaatagatcacattcatgaagggccatattggctgtataagtaccgtgcattcccgccatccctagaaaaagcggatggtcagccgggaagcctccgagccccaaaagggtgtgtgccacagggatttgctgctgttcggcataattttttaattcttctgacgcttttccgtgcagtacgcccgcacccgccaggatcaccggttttttcgcactgctcacggcttccacaagcttgcggatctgcaaataattcggctctgttgtcggctggtatcccgggagattcatctcatgatcgtagctgaattctccttcaattgttgctacatctttcggaatatcaatcaatacaggtccgggtcttccagttgttgcaatatggaacgcttctttaatgatgcgcggcagatcttccggctggcgaacctggtagctgtgttttgttactggcatcgtaatccctaaaatgtctgcttcctgaaatgcatcgctcccgattacagaggttgctacctgccctgtaaagacgactaacggcaatgaatcaatcatggcatcagcaaggcctgtaacaaggtttgtcgctcccggccctgacgtggcaatgacgacacccggttttccggagacccttgcgtatccctccgctgcatgaattgctccttgttcgtgacggggaaggatatgtaccaaccctgaattgtatagcttatcgtaaatcggaagcacagccccgcccggataaccgaagatcatttctactttctctttttttaatgattcaatcagcattaatgctccgctcatcgtctgtgtacattcggcagatgctgaatccacctgtacattagtccccattttagttcctccttttggattttcatcctttaaagatcatcttttcattagctatatagctgattattcaataaaaaaagcccttccgcccacaatcagccgcgcagtaactgcgatagctaaaaggggcgaaaaggcttttctttccgcggtaccacccttgtttacggcctgttaatcggccgtctcatggatatttctatccgctttagtaacgagtgaatcaagttcacccggccaagtcctactgtcatttcagactggcactctgaggcgagttcaccttgtaaagcttcgccggttctcagctaacccggttctctgtggaaagctttttcaaggctacttatcctcatctgcgcttttcatattcagccttcggaacggttttccagctgttcaagaaggtcgtttgtttttcactttttagaatcatactgcgatgattttcgcttgtgaagcttgcgtttatcttttgttgaactcatattacgccgctttggacgcagtgtcaacagcattttttaaaattattagacaattttgattaatcaatctatattgtatacgctttcattattggtacaaaaggaattgcaaatgttaaaagtttttataatttttttattaatctatcaagaataaaccagaattatttaattttatataaacatgtaagattttataacacgctatggttcgtatatggattgagtctgacagatcatcttgcaatccatttcaatttcggataggcacccctattattcctcggcatacattaatggtatcttgcaaagaaaaggtgatacgatgaataaatcatttgcagacatgcaaggatttcctgcgggctttccaagcttccccaactttccgcagcagtattatcctgctacccctgccttctaccagcaaagccagcagccatttggaggctacggatacggacagccgttcagtcaggcatacagcccgttaaccactccctctggaatgtactcctcattcccatacgcttcagggttttacggacagcaattttcaggtgcaggctttagcggccatggcggcagcttaagtgctccagcgatacatgccggcggattcagcggggcgccaggcgtacacggaggctttagatattaaagaagaccacaagggccgaacatctattgcggtccttttattgttttaaaacgacttcacaaatacagtcacattttctgtctttatatttggaaacaggatggaatatgattagatgaattgaacgatattctgcacaatccgtaagttttcgaggaggaataaaattgcatataaaaatagacgatttaactggacgtcaggtggtttcactggtgaatgagcatttacatagcatgacgcttatgtccccgccagaaagcattcatgccttaggtttagaaaaactaagagggcctgaaataacattttggagcgcatgggaaggtgatgaactagctggctgcggagcgctaaaagaactggacacccggcatggagaaatcaaatcaatgcgaacatctgcatcacatttaagaaaaggcgttgccaaacaagttctccagcacatcattgaagaagccgagaagcgaggctatgagcggttaagcttagaaacgggttcaatggcttcatttgagccggcaagaaaattgtatgaaagcttcgtttttcagtactgtgaaccgtttgcagactacagtgaagatccaaacagtgtgtttatgactaaggaaatgtgagacgattttataaggatagataagtgcaggggaaggtctgtcttatctatctttttttatattcacacatttttcacctttatgatacacgccaatgttttcaattttgtttaattcaaagaacagcgggaattacaaacgacatgaacgatatcatgcaaattcataaaggaggagattgatatgaaaagcatagttggtgtatatgaaactccgcaggaaaccatcgcagcgattgaaggcttactcacaaaaggctatgattctgatgacatttctgttgtgacaagccggcgagatacagattatttggagtcacgtacaggaacagaagtcaatcaagccatcgatgcacatcaggacgaatctgaatcttttttcgataaactgaaagattatttcacaatggatgatacttctacacacagcaaagcattatccgacttggatattaaaactgatgaaatagacaagtatcaagaagatttggatgacggaaaacttctggtagccgtcgatacagatgcaaatgtaaatgctcctattgataacggcaatgccctttcaggcggcttttcaagcacaaatgaattggattatacaacgaaagaagaaaaaacgatgccgctccgggaagaacagctgaaggtcgataaggaagacgttcaaaccggcgaagtagaaataggaaaagaagtgaaaacagaaaaaagagatatggacattccggtgagacatgatgaaatttatgtcgaacgccgtccagtggatgaaaataaaacggacgctgctcccgtcaacgattcggaagagatcagagttccaatcgttgaggaaaagctggaagtgactaaaaaaccggttgtcactgatgaagtggttgtcggcaaacgcactgttgaagaaaatgaacatatttctgaaactgtgaaaaaagaagaacctcgtctgaataaagaaggaaaagttgacggcttggatgatgatccgttaaataacaaatgaaaatcataagacgacaacaaaaacctcaaatccatttaggatttgaggtttttcttttggtacgtcccaggagagattcgaactcccgaccgacggcttagaaggccgttgctctatccagctgagctactgggacacgttttgtttttcgctttaactatcagcgacaagatttattatatatgggatgcaataataagtcaacggttttttagaatttttttcatgaggaagaaaattttcttcctcatgacattttcatagtgtgactcggttttgcagatcctcaatttcattgcctgcttggtcgtaaaaacggactgtcgcagcatcattttctaatgtcagtatagcatagctttctgtcctgcgcaccctcggaagccggatgctacctgggttaatcatcagttttccgcgcagcacttcgcttcccgcgatgtgcgaatgcccgaagcagataacatccgctccgagctcctctgcacgatagtatacgtttaacaaggtctgttttataccgtgaaggtggccgtgtgtgaccagtatttttcttgagccggcattcagaagaagctcgtccttaaaatcgccggcaaaatcgcaattgccttttacaaccgcataaggctccaatgcaggatgcctcgtttcaagctcagagtccccgcaatgaatcatgagatcaacttctgcctcatgccgtttcgcaatggtttggagttcttcttcaagcccatggctgtcactgataatcagcacgttcatgtacaagcttcctccttatgcctccaaaagcttagacagctttttaagcgcgtcagccctatggctgattttatttttttcatcacttgtcagttcagccattgtcttatctttatctttcacgataaagattgggtcatagccaaagccatattctcctctcggttcttcggcaatatacccttcaacatggccttcgactgtttttgtttcctctccgggaatactcacggccagtgcgcagcggaaacgggcggtgcgctgttctttttcgatacctttcagctcgctgagcactttttcgatatttgcctggtcgtctttctgttcccctgcatagcgggctgaataaaccccgggtctgccgccaagattatcgatggatagaccggagtcgtccgcaatcaccattttgttcactgctttggcaacagcttccgctttcagaatggcattttcttcaaatgtatggcctgtttcttcaatttcttctgtgaatccaatttcagctaaagatttgacatcatagcctcttggctcaagaatttctttgaattccttcacttttcccggattatgtgtcgcaataattgcttctttcatgatgatcaagcctttctgtctttatttcagttctggcagagaatcacccagcacttctttttgcttgtcaatcagctcttgaattcctttttccgcaagacccagaagaccgttcagatcctctcttgaaaaagtcgcctcttccccggttccctgcagttccacaaaacggccgctgcctgtcatgatgacattcatgtcaacttcagccgaggaatcttcttcataatttaaatctaacaaaattccctgttccttatcaattccaacagagattgcagcaagaaaatcagtgatcggatttgtcttgattgttcctgctttgatcagcttgccaatcgcaatcgccatagcaagaaatgcgcctgtaatggaagctgttctagttcctccatcagcttgaataacatcacagtcaatccaaatcgtccgttcaccgagcttttccagatctacaacagctcgaagcgcgcggccgatcaggcgttggatctccattgttctgccggaaattttccccttagaagattctctgattgttctttggtttgttgcccgcggcagcatgctgtactctgctgtaatccagcctttccctccgccccgcaaaaacggcggtacgcggtcctcaacagacgcgttgcagattacctttgtattccctgctgttattagaacagaaccttccggatggctgataaaatccaaatcgaatgtgattggacgcagctcatcgtgttgtcttccgtcatgtctcatgttttacctccgattgtatgtacataaaccatttttgtcccggaattgaataaagaaagaggcagccggaacgctaacctctttctttctagtatatcaaaaatcccaatttaaaaactacccgtattcacttgagatggtctggagaccggttctgtgagcttttcgcctttttcatttacaagctctgattttccgttcactttaacagagacgctttttacatccggctgctccgttaacgtcagcacaatgctgttcagcacttctgaagaaatcattttcgtcttctcatcggcgctgccgaatatagattgattgaaatccaacgtcacgcgcccgtctttgattttcggtttgctgaccagctttacatcttcactgaagtctgttaacagcccgctcaccttgcttggccctttagccaattcattgatggctgccgtgatgtcgtctttttccgaattgtcgattcgtttggtcaccggcacgtagtattcactgtcttcgttttccgccaagtagtagactgtcagcggatgggtagcagtgagatcatttacaccggctgtttccaaattaatgccgtctttgcggcttaaatcatctgagatcggcgtccctcctacaggcatctccttcagttcatgcccgtttattctcagcttcactttatctatcgaactaaattgcgtcagtgtccacgtcacagattgaacgattttctgttcgtcttctttcttataatttttgaactcattagagaaatcagctatcgcggttccatcttttttgatgtcaacgttaacggtggtgtcagccggcaatacagctctgaagccattcggaagaatttcagacacaggcccgccctgtacgaggtattcaagcgcctgcttagccgtgctctcacttttagggagaggcagcgtttgcgcaacaacatatccgtttttatcaatgagataaagctccctcataacagtagatgaggcttgatccgcttttgcggtatcgcttttttcactttctgtttttttggctgctgttgtatttgaattggcacccgcttcatcgttcacgaatgtaacgtcttgaggcggatcaatttcctcggctgccttatcagattgaaacaaaccgcatccggataaaagcaaggcagaggtgagacaagtggcaccaatgactgcaggtccttttttcagcatacttttccctcctaaggatgtttgtactattatgtatacgagcctctttaggaaatagaccgaagaattccggcaaaacagaaaaaaacccgcaacataccgttgcggggaaaactatcttttaatcggttcttgcagtgagatacattccacatgcccgacttcatggccaaaccaatcgtctgcgatttttgcaaactgatcacgcgcccctgttgtcaggaactgatgatccggggcaatcggagactggttcagcagccctttataagagagaattgtgctgacttcccgggctgtttcatcgccggacgaaataatgtttacgtgctctcccatatatctttgaatggcttcttttaaaatagggtaatgggtgcagcctaaaatcagcgaatcaattgatgtgtcttttaacggatacagcgaggttttaacaatctcgtctgctgttttgtcgagaaacttcccgctttccacaaaaggcacaagcagcgggcaggcaaggttttcaaccttcaaatcagggtttaatgccaaaagcgcttcttcgtatgcattgctcttaatcgtattctctgtgccgatgacaccgatatgctgattatccgtcacttttatcgctgctctcgcaccaggctggatgactccgaccaccggtataccgacgctgcgctggatgtcatccaatgcgatcgctgttgctgtattacaggcgatcacgagcattttgatgtggtggttttcgagtaaataattcgtcagctcccacgtatattgaagcacctcttcttcagggcgcggcccataaggacaccgtttcgtatccccgacgtagataatattttctttaggtagctgtctcatgatttccttcgcaacggttaaaccgccaaccccggaatcaatgactcctattggttgttccaacaaaatcgcctcattttctcttcatttcatgctgcagtttcatcaaagatttttcgaagatggctatttcttcatctgtaaacgattcgaacatatcacgcagatattcctgtctttttgtaatgacctcttggataatccgttctccttcaggcagcagatgtatcctgacaacacgtctgtccgccgggtccttgacccgctcaacaagctcatttttttgcatgcggtcgattaagtccgttgtcgtgctgcatgccagatacattttgcccgataattcaccgattgtcatatctcctaattcataaagccattgcaagccgacaaattgcggcggcgtaatcgcatattggttaaggatttctcgtcctttttgcttaatgatcgcggcaatgtggcggagtgacttttcaatatccgcaacatgctccaaaggttttgatgtcatttgtccatccctcactcaaggatctcttacgcacaaaagcgttccgtgtctattttccttcttttttgaagaaaatgcaagactcgcaggagagaaatagaggactttagtcaaacaacatcaagaaataaaatttaatttatgacttgcctacgttttgcacagcattccaaatatggtttcgaatgttccaaacaaacagcaataaccggctccttccaaaagaaggaataccggcaaggattaaagctctagctcacccattctaagaagctcaacaacggcttgcgaacgccctttcacacccaatttctgcatggcatttgatatgcatatctatcgcaaactaaaacaataataatcacttgaatttataatggaaatcgactgttccatcctcgtatattacaagtttatcaataagcgctgaaaatgcttcgaataaatcctgatcagttctttccagctgtgcgaatgcattcttaatatttgatatgtcgattgtttcttcttcctcacgctcaagcatgaacagcttatcgttcagtttttcaatttgttcttcaagctcttttcgcttcgcctggaattccgccttagtgatcaactgatcttccaagtacaattcgattagacgttttttcttgttttctgcgttttcaatttctattttcgttcgcttgatccggtttttcttctgctcttcaaaatcagattttacatccagttttaacttcttgcccttttgtttcagtgttttaataacaaaagcccgcaagtccttatattgcatcggagcatggtttacacaaagagcagttccacctcgtctgtaggcgctacacttcaaataattaaactctttcttctcacgtttctgattgtatttgtacgacggtagcacaaccatattgcaaccgcacacaccacatttcatcattcctcgtagctcattccgagggttaaaacgctttttacgcatcttgtgttctttgttattagctttctcatactcttcttctgatatgatcttaggacaccagtctttgtaaacagtccatttttcttttgggttgcggataaattttttccgtccccctattttgacttgagtatgtctattggcaataaacacgccacaataaataggattctttaaaatcgtttgtactgtagacagctgccaaaactcagtcttttgaggctttacaatgtttccgagtgccaattcttcgttgagcttgagaacgattcttttatgtccatacccatgattattatgaagatcgaaaataaaacgaacgacttttgcttcttcttcattgatagctaggaatttaccttctttcttaaatccaaaaggtacacggccggaatgttcaccacggcgagcttttgctgctagtgccccgctggctgccactgaaattgtttgaggatattgggcagcaaacattgaaaacatttcaaatttcattgagtttttgccttcatatagactatcgtacccctcttcgagcgtcacaactcttacaccgtgggccaataaaacctctcgaatttcaagggcatctttaagatcacgagcaagccggctgattgatttaaaaacaaccatcttcagctttcttttttgcgccttatctaaaatgagttgcatcgcttttcgatcaagcagcactgtcccgcttatcccatcatctaattggattgcttcatctttccattcgtaattatttttctcaatccaatgatgacaaatatcaatttggttggctattgatgtcacctgttcatctttttctgaggaaacccgtgcgtaaactgcataagggtaatcttcatatttgatgatctcctgtgtttctgtctctttgaagaacactaaaccaccccattattttgcatttggtacattttagtgtgattatagcataatgattacgaacctcctatacttttccggttgattttcgaacatttgttcttgtataatttgttcaaggagttgatcagaatgaacgagggtatttatgataaaagatgggaacaaaaatttattttgcctgagcaaaggacagcgctattaaataggaagaaacaagtccaaaaaattgaaaaacccatcttagatgaataccaattggaagatatggcccgtgttatttgcgaggcgatggaattcaactcggttctggtcatcggtgtatacagagacggttttatcgaagaagtaaaaggacatgtccattacatagatgaagtaaaacagaggctgcacgtgaaggatttaaaaggtgatacaaattttattgcatttggttcagttctttcagtagagcaaaaataaaaagaaccagccacataataagctggtccttatctttaattaaagaaatggttatgtaaagctttagaaaatccaaaaccttcttctggtccctttaaccagagagaaataaacttttcgaaatctacttctttttcaatatctttcaaaattcttttaaattcttcagtaaagttatgaagagagacctcttcgccatttttaagtttatcagtgtactggctcgttaactctcttaatccttgatactgtttttcacttaaatcataagccaaaacttgatcaaataagccaaaccgatcataatcagctgctaattgttggactaaccttagttgaaaagcctgtttctcgacttttttttctaggttgtcaagcctttcttctactgttaccaattcaaatcacctcaattaaaaagctaagaaagtaaatacacttgcaatagttctagctgtagaagattttacaccagcatcaattagatatgaggaaacagtgtcaataattgcgtcctccacaacgtcacctcgtttaactaactcgtccaaagcatctgctacatcatcagtatgttttgcgaaggtttttcctgctgatccacctaactcatcgactacctcaccaacaattctcccaccatgtcgaagcgcactggctgttgccttcattgcttctttagcaatccattttttaataccatttgtgtgaaattcaccagattgttcagttgtattagttgataattcggatagtttagcaggagtttgataagtgacttcttgctgtgcctgtaatgttacctcttgagctttggcatgtccatccaacggaagaactaatgataaagagaaagttaatgcggatgttgctaaaagtaatttcttaaacatgaaatcaatccctttcttttaaattatttacatgtaaatgatagcattatatttcgactagaaaaataatgctttttactcaaatattagaataattttgaactatctgtaacaaaataaacaaaagtatctcctcgagaaagatactcaaggagactatttatttacttcaagagcgcttctagtttcgctttcgtatctggtccatatataccgtcttgaggaagcccgtacattgactggaaccttctaacggcatcagctgttttcggtccataataactatctatcccgaagtttttagcttttttatccggatagaaatgcaatgccgccagcgctgtttgaatctgttcaacagcatcactgtgcatcaatgggctcttcactttgaaaatgccagaaggcagattgaaagatgatttctttttgcttgagcttggttttttcactgccttggacgaagttgttttcttgctggatgatttgccgccaagtgcttttaattcagcatcaatagccgctttaacctcattccagcgtccctcgtctaaaatacggtgagggcaatactttccgctccaatcttggtgcttccgcactcgatcaataccccatccgcgttctttaagcagctgagcaacaaacttgatagccaacttttcagcagccctgtatttaggccctcctgacttgctgtagcagatttcaacgccaatagacttacggttcccggtaccgtttgttccgtctcctgtatgccatgcattgcgatctgttgggatgccctgccttacctctttatcatcaacagcaaagtgaaagctcgttgaacttgtgtttccgatcatatagctgacctcgttagcagcagatgcatcattgtaagtgttatgaatggtgatgtattccgcggtcatcggattagggcattttaaagcgtattttgcttctgatacaaggttctttttcactgcgattgtcataaatgatctctcctattctgcttttgaattagaaagagccgccagctggcagctcacttggttagattgtgatttttcaggacagctttttgctgatggccttttgcagtcacatagttgtttttgaaccatgctgtaaatgtcgtgccaatagtaaaggctatagagcccgcagtgtacagcgcatccgcaagctgattcacctgatcctccgtaatatccaaaggtgatttgccaagcatcagcattgtttggttgataagtgcaatcaaaagaagcaccgtccgaatgaccgtgcctttgtcaaagtttttcatattgtgttttcctccttatttttgcaaaacagtataaaaaatagcgattgcgccgccaataacgccagtgcatatcgctgtaatgatagcgccagttattgtgcgtttgatccaagttgtattctcttcgatcttgttgagtttttcgtttaatgtcatgatttgctggtcttgtctatcagaaacgcgttcaagaacatttacacgctgttcaatcgttttctggcctgccttcatttccattatctctttttgtaatgcatgcacatctggtacctccgtcacttctgacattagtacgccccccttatatctatttcacgtttttcacctccttagaggcaaaataaaaaagccttattgactggctcctgtcgtttcctcgtatggttgacctgttacttcttggtattggtcatgtgtaatgtattgtgcctgaacaccttctttcaagtcatcaacggaacaatcgttaaatgccatagcctgctttaccatggctgttgtggcccatttgtagaacaacgcaaatacccagaaattaagattcacttgtcattcctccctttaaatagagaacatctaattttaaagatgcaacttgctcacctaaagattgattcaaattttctgcttcttttcttgctagcacttccgcagtcaattgtacgcctaaagcattttgagccagctcagcctgttttcttgccagtttttcgtctgccagctgttgcccaagtgtagccagctgttctgctataggattggtttcaggaatactgccttgtttcagctgctctttgtattcttcatcagcagtttcaacccatgtttgtttttcctcatcgaataaaggccgccacataccctctccatttatttctggaggaatatcagtagcattcgccgggataatatatcttcctgactctctatcggggtgtaactcaaccggccttcctaaatagatcttatcctcaccatatgggtatattaatttcatacttctccctcctttctttaagttagaggcacatctaagtcaatataatatccattcactttagactcagtattagccattacccctgttagtttcatatcaccagatgcatatataataatcttgctgtaaccagtggttccgctagttgcaaccagtttgactatccctttgcttggagcgctagaagacgggatactagcaaatacaatctctctatcagtaagaacatgaccattaagatgcaatgtatttccgactttacggtattgtaaaggtctatcacctgtagttgccccgtttttgtatggaacatttagccacggcgtctctataaagtctaggtctgtaataacctctcgccacccagtgaattctccctctttatgctttgttccaatccatgtacggttatcataggatcttgttgcgacaattttctttaacccttgaggtggagcaaggtcagccggaacatctgtaatatcataatagtaccaggcagcatcatcatcccccggatgattcagaacacctgccccaaaataaaagccagtcggataatcaaaaaggttttgtcctttagttatctttattctctgaccgttttgggttgtcaggggatagagttgtccattattccatttgttcttatcttctttcgttacatgaatgtctgttttattttcatgagtattgacctttgtttgggctcctgctgagtattcgatttccatccaaggcgtccagttatctgatccactcaccttatttcttatgaatttccgccgattatcaggtatagaggttgttgcactggtataagctgtgaattcctgatatggataagtgccgtagttgtaaaccaataaataaccattgctattcacaggggcattcagtgccgttgaagctgaagtcatataataaaaccctgtttcaataacagtattgaaatccacgcctgacaagtttttcatcaaaccattgtcttgtgttaattttgataactgagccgcattccacttggttcgctctgcatcagaaatatgacgaatctggttatagttatgtgcgtcaaactccgttttggttgcctgtttgtcattggtaacattaccgagcccgacttgatcttttgtcaccccatgagggttgcttttatcattaatgtgttgttcagtatacgtttttgcatttttttcggctgtatcagctttgttttgcgcccctgtagtcgtttccttcgcattccaatttgaacgctctgtggctgtgatatggcgtgtggaatctgtattgtgtgcgttgaattctgttttagttgcttgctgcacgttgtctacgtttcctaaacctacttgggcctttgtgacttggttggggttatccctacgcgcagcaaattcatctgtataagcttttgctgtttttaaagcagaggaaacgtcatcctgcgttgccccgatctcttgcaattcctttagtgcatgataggccgtatactgataccagttgaaccaatccgcagggggatgatccattggtttgtatccttcatcaatggaggactgcgggggccgctgcccggcgttcccccattcaggcaattcttttgtaaaaggcataaacatcactccttaaatcggtaaagggtaatcatcttcaggctgaaagattccgccaagtgttcccccatctgtcccgtctgttgaaaatccatattgacttgtttctatagagttagcagaggacgaaaaacgaaaggtgccgtttaaatctacataagccacccgtacgcctgcagcaactgttttttgaacgatattcgaaaactgtgttgcactcattccaactttgctcaaagcctcaatgggtgccttttttacgataatggcagccggttcatcttcattattttccttgctgctgaaaatgtgtatttcacttggcttgcagttcagtgttttggctaaagcttcaatgatccggtttgtggtgccatctgaaacatttctggcaaccttgccgcgaataagcacacgataaatttcatcagtggcacggcccctatcctgcgacacgttgtcaccaagtagatccagagcctttccttttgccgcatcaatatcccgccagttctcagctgtggttagcgcgcttttaagtgctgtcagctgttcatcgacaattaaaaaaagctttccgatattgctcttttcatctttcaaaaaggcatcggtcagctttcctattaagtctttaatcatatgtgattcaccacgatttcatcaaaatgtacctgggcaacctctttaggttcaatttcaatgtttgactgtgaaaggtttgtcgcatctttccccatcctgattgttacatcagagacaccatctacttgatataccgcgttgaacaactgcgacaatataacatcatcgcccatttgtgagccggtatagtaagagccgtttgcatcaattcccccgattttataaacgaggttgtttttgatctgacttactccatcaatagggaaggaagcatttgtttttaaatccagctgcagatatattttgacttcccttgcaaaatcaaatttgacggcatggtcaagtccgctggcgtcagttatggtgacaacttgctccccgaccgtttcaattcctgcagcaacactgtcaaacagtgcttgcgcaacatcatcttttgtaccgcccagaacataagcatgaatgctttttggtgggttgccgtccgcatcggtctgcatggtattgttggcaacaatattcgccgatctgacgcctgacacgcttagcagggctgaaataatacctccgtttgtagatgctgaactgccctcaactgatttctttattcgtgcccggaattccgaatctgtttcctcgtcggcaccgcctgccgatggttccggatttgtaactgaatacacgccctctgagggctctgcctgcacggtaatggtatttgccgcaacattgtttataacgcccttagaaagcgagacagccgtccctgagcctgtcccattagcctcaattacaacatcttcaatcaattcaaaatagatgcctgattccgtagtaaactgagtttgttcttcaattacgatgccgggttctccagtaaaggacagagtcacaactgactccgcagctggctcccgcgtgatacccgagttgctgccaagacgatcgagctgcacgccctcagacttactgacaaagccgctgttataaaccctttctgcaatgtcccacaagccggcaagaaaccaagcaaagatacgaataataattcctaatggtgttttactggatgtgtttacatcctccccgaattgctcccgcgcccggtcctccatactatcaacaagctcggaataggtttgccgttgaaagcctgtttcatcaagcaagatcaacaccccctatctcaattgtttcttcatcctcttttgtcattttcacatgcaccgcaagactgcgagactctttatccattaaaaagttcaccgattccacactggcaatacgctcttcttgagaaatggcatttataatgtcatattgcgcctcttcttgatcaaactgctttcttaaaatgttgctgcgatcaaggccgacatgttcatcaagctcaaactctcctaaacttgttctaaggatcatttctactgattgagccagctcagcatcaccctcaaccatttgtaactcaccattttcaaaacaaagatccccgtctttaagcttgagagttttcatccttcccacactcctatgacaactggatcgtttatactgtgtgtgcgcctcgaatccggatcaaaggttttattgccgtccaggttatccagtgaacgttcagcaaacgaaacaaacacgcaggaccctactttaatatcagcttcgacgtgtttcaaaacaggcgcatgctcgattaaagggtattcatgtagatactcaccatcattggtttgaaacagcaatttcagatcggcagtgtgtttctcagcattgtaatttacaacccgtgctggcgccgttgtatggattgattgttttatccgctgttcgaatccgtcaaagaactttgtcgctttactcattaaatcaccctacattctgtgaaaaagtctttaccgtcaaaggaatgagagccatctttcacacgatattttcctttcgctgtcttgctgtttatttctatgattgaagcaactgcgatacgatgctgcaataggcacttcaccttataccctttgagatcatcttcctcaaattgttcaggcgtttccacaagtcctgttgcctcttcgagcttgaaacgttcgtcatccccttgactgagtggccgaataacaggacggccgcgccgataatacatgactgccccagcatcatgaatgacctcttcaagattgttttcaatcaatccggtgacacgatagccttttttataaactttatttttaggcagaatgatatttttcacttttataccgagcacacgcagaagcttatcgacaatttgccttgaggttgtgccagccttgaacgtgattttcatgtatctcttacggtatctgacctctgtccgagtgccataatttcggaccgttttatatgtccggccgttcttatctttttttacagtcaccactggttttgcgagcttgtaccgctttttcacatagtatttttcagcaggatcagcgttttcagtggttactttcatatgggtgtaatcatcgccatcttttgaatagatggccgttaccttattcaaaccgtcccaattattcagcaccttggtaactttaccgatagttaaaacaccgtaatcgtctttataaccagcttgaacagtgatagtgctgccttttttaattttgctgattgaatctttgctcaggttgtatatttcaacctttgtttcattcggtttaaagtcatcatcaaacgggacctcaaaatgaatctctaagtctttataatcgaaagtggtttgtgaactgccgttatctatcgtgaccttaacgacgcgcccaaacagcattttattcgtcgccatcgtcttctccctccgcatcgtccgagacatcatcaatataaagaaacacggtttgcataaaattctcgtatgtaacccgtgtttctgtattcgattcatccatagggataagggaaggcgcaggcagtttctcgtttacaatgtcttcccacaaagggacgttcaaaatcaatttttcgcccagcacgattgattccatgtcttgatcatataaatcaagtgaaaaactatcgtctgtttggttgtaattgatacgcaaaatgaacgtgtcatctgctaaatcaaattcaaactgctgtggtatgtcctctttgtcaaaaggaatgtaatctcttgatgccatgcctttccctccttcatctaatcctcattttgacccctatcggaattcttcggtccggccagggattcaaccgacgcaaagcatttactgtggtgccgtatttacgagcgcagccccaataagtgtcacccttcttgaccttgtggtataacttgccggatttttttgttttcttcttgctggctttcttctttttcccggctgttttcactttctttttgacccacgggctttttgcaatacggatttcttgcaactcaattgaaatagcaaaaccgtttgtgtaatcgcctgtgtcgcgatctatctttgtgatgatcacatttttagcaaccttacgcccggtataagtcaaaagagtgccggcataagcctgctttttcagatattcataatcactatttgctgttttgcctaataaatagccagagactgttgtcgtctctggctttctttgtacatggtccgtgatcggaacccctttttcaacgggatatgaagtgacctccacatccgcgccatcagattccttttcgtttacgagattaatctttccgagcttcgccaattaataagccccctctggtggataaagcgacttcagcatgtcgaaaacttcgtcaaatgtttcagttacagcctttttcacctttgtttctgccccttcactgccgccctcaacttttacgttgatcgacgggttaaaagtgatattgacagatgaactgtttgagcttgtagcagccttttctggtgtgtaaccagtatccgcgccaagctcccgaccgagtgcagcatacattccgagtgattggtttctgtatcgtggctcagttgtgatgacatactccctaaagccgttttcaccaagcgcagcgacttgtgggctgttaatgactccacctgtcgcataacctctatacggcccaccatgagccatagaaacgagcccagggtgttttaaaataccgccgtatctgctgttcaaatagttgatagcagcaaggatctggtcaactggatttttgatatttccgtgacccggttccttgtgagcgttgaatgtacttggtataaactgcataagcccttgtgatggatggccagctttcgcattcgaatcccaattgttcacgacattaggattcccgcctgattccttcatggcaatagtttcaagtgcgccagcatattcagagccaagccccttgattgatagcgcttgagctacccactttttgacggcttttgaaccgccacctgaaaagctttcagcgtaactggacattttgcctttaacaaaaccaacggccttatctttgacaaagttaaaagccccttttgcgatatcaccgaacgagccagccatagaaggtgcagagacacccattttttctaagacttttgttaaaagcttagatgggtgtccgatgtaatcaaaaacatcaagagcaacatctttcactttacctgcaacggattttacaccattccatgcttttgtgaagatatttccttctgtacctttcgcgtaagctggaactcctgataaagcagcccttgtctgtttagcagataacacctgagtgccttttgggaggttcattagtgtatcacttgcagggctgagtcccacatgacctgatggagtacgatacatttcaggaccagcgtttgcccctttaccgtctcccagtatagccgggcctcccgggtgtccgccggttccgtgtgcatacttaggtacaggccattcaggtatatgtttatctttcaaaccgatcttatcaagtacccagttcactccgccgattacaccatttactccttttccgagtgctccggcaagtttgttcgctaagctagtcacaccagacacagctttatgagccatgttcttaattccatcaccgattttacccggaagtttcttggccccttcgactaaatcattgaaacgatccataactttttgacgtaaatcaagcgccaataacgcgactttattttttatataaagccatctatcagtgattgctgaacccatattacttacaagctttttcaccatgccgacagcactagaaaaaatttgcttcactccgtcccacatcatgcggaaattcccagtgaataagcctttgaaaaccttcactattcccataataatgccgattgcaccctgtattatcgcaatgatatttttaagtgcaacttgaattattgagagcacaaccgggaacacagcagtcacgatatttaggatgaaacggatcgccggaatgaccacagttgtaatgatattcgccagaaattgcaaaagagaaacaacaatcggaagtaccgcttgtatgatttgcatgatctgcgggaatacctgctgcacaacttgaatcaaaataggaagtgctgcttgcgccaactgtaaaatgattgttgccgctacagtaagcaattgagccacgattggaagaacagccatgatgacttgtttaataatcgggaacacttgctgcaccgctgataaaattaacggcagcacttgaaccgctatttgtccgatggatgaacctaaaagctgaatcaattgcaaaacaatcggaagagcttgttgtacaatgctcaggatcaacgggaacgcaagctgaatcatttgaaccaaaatcggtaaggcattttgcacaattgaaacaaggattcctgagaaactgcctatcaattgaataatgattggcagcactgcattaattacgctcagaatgactggaaaaatcgtctggaagccttgaacaagtaacggtaggatgctgcttgctatttgcaagacactcgtccataaagtacccgacaactgcatccaagctgaaagcaattgctgaatcagtggcatgatttgcggaccgattgtctggaacgtttgcgagatagctgcagcaaacaaaacaagcgtgccgcctatttgaacgaaagcctgctgaagttgtccggccagctgctgaaactgtggcgtcaattgcgtaaccaattgcccgaaagactgttgaagcgtgttgatgattggctgcaatgcctgaaaaacagtcgttagaacagattgtaccgatgtccatgccgtctttaaggcctggcttacattttggtttgtttgttgcatgcgatacaaggcgccagcaacactcaaaatagcaccgacagccacaccgattggccctgacactccgaggaatgcaagtccgatcgccgcgacaaacggagcaacaagagaaaccatacctttaaagctggatagaccgactttcaactgctccatgaatcctttcacgatgccgtttagaccgtctgatagtcctttaccgaagaagtccgagactgtctttccggcattatgaatgaagcctgacacggttttcacagccgttttataggccgactcaattccagccactaactgtggatgcgattcaccgagacgatcccataatttcaaggattcagcctgcattttatgaatggctgtgatcgccacgttttgtgcgtccttgaatcctttcatgaatgcaggttttaaaccctcagcttctttgatcatggtatggaatgcaccgacaaccgccgatttccccatgtcagcaaagcgtttcatcgcgtctgtagctggcttgaatctttcctgaagcttatcgaaattcttgtacagcaaataaatgccggttacaaggagaacgattgcccccgcaacgacatacaccgtgcccgacatagcagccagcccggttacaactggaccaatgaacatccacaaactgctgagagctccaaggaacccattaactaaccctacccctatcgctagtggcgataaaagtagggttaaaacagggatgagaagcataaatccttggatcattttcgagagtacagggtgcgcctcattaaactgaataatcagcttcgcaacggccgtaatgcccttgtatatcgccatcgcaaacgccgcaaacacttcgattgctggctgaatggctttcagtagtgtgctgcacatctcttcccatgcctttgaatagccgggaactgtttgtgttgctgctttatgaagcccttggaacatgaaaaagtttgtaaaagccgcgcccagtgccaccatttgaaaacgcatataaccctgagtgatcatcattgtcatatcgttaagctctttcatgttggcagtaggtccgagcattttcagagccaaatgcgcagcagttccctgctttgccatgttctcaagcgtattcgatacggcaagcccagctttattgacttgatataatgggtttcccattcggtcatagttcgccgcaatcttctcagattgagtggaccgagccatcaatgtccctacagtctgcagcatgctcatgcgcatcattttgttgtttttcatcatgttgtctgttacttgcttgtgagcacgtcccagcctgtacacttcatccataaactgctgattggtgccagaccagctgtccatctggttccctaactgaaagaaaccatactgggctcggatcaattcattccgaaaaccgttcatgccatatcgttcttcatgccaggcttgacgcatttcattgagcattcgtattgtatcggcttctagtccacgggttgagccgcgcaaaaagtccatttcacggttatactgccggattccccggtagtccggggccgggacagccaccgcagccacgttattctgaacgctttgcgtgttctgctgggtaacgtttgctgcgggcgtaccgatacggctcatatcgacgttattcaaattttgcctgagttgatcaattgattcattggcgtttgttatagacgtttgatcaacattgatattaacctcagacggaaggctttgaataagtctgcttgtctcttgtacctgggtattcagctggctcaaacgggatgtaactaagtcgatttgaggccctagccgttctatcgtttgactggcagtttgcaacgatgagttgtccaagatcatactcatatggatgtctctaaaattccgctgttgcctttgaacctgagccatccgtgtacgcatctgtgaaaaactgccgccagcatcgccgacatgatcaacgagtctatctatttgctgatttgctctttctagaggggaggtatcaacgttcaattcaacgtcaatatgcgtacttcttaatgcttctgacaacgttcataccccctcatttcttgttattcctcttgttttcttgctcaatatggatgtcgagggctgcatttgcctccattagggtatcgagatccatcatcgcgacctctgagaaggagaacttcccagacatcacgagtctatacataggccagttgtcactcgccttctttttgtaatacggctttggtttgggtttcgtcgataagaaaggattgaacctctttcattaattccatgaaaccttcgtgttcatcgaaatattcaaagctcactttcggttggacaacgacttctttcatgaataactcatacatagcagctgaatttggtttacctaaattgaggttgactgcttcgtcctgaatttccaccattcgctttgttcctgggtgttgaagagtgtactcaattcctttgatagttactttcttttgtttaccgaattttgacataggttttccctccgcttgtttagtttgcatatattgaaaagcagccctattggactgctttcgcgcgtttgatttcttcttttttgccatagcttaattactgttccaatactgtatagtcaaagacttgaatctcgaactcacgatctccaatctcgtcactgaattcagcatcggcaggctttttgaccatcgcttctgtgccgccgattttttcctgtccgcccgtaacccagatagggaaacgctgggccgtgtttgccattttattcaggtatggtacaaatggcgatcccatggaaagagtcagtgtaattgttccgagtgggttgtttttcgttgcaacactgacatcacccttggcgctgactttagtcgagaacttttcttcgtcttttgcacaagaaaccattgtgccctcggaataaccggttacgattttcccgtcaatgttcgtgttgacttcgtttgcatcataaacgtacatgctttatatcctccttaaattgagatttcaccagtgatttcagcagaatgaaccgcgccagccagttcaaaagtaaatgataggccgtcgtatacacggttttttctgttttcatctgtgatttgatcacgggtttttgtgctgattgaatacactggctgcccgtctgcatcttctgcaacaatgccatttgcaaaggctgtttgcagaacgtttgtgacctgtacactcagcaatgaaaaaccagcattcgagaacgggattttgccgttgtttgagaatgctgattgtattgaggtttcaatattcaatttcacccaatctttgccgtgcagcacgtcgatatattccccggatgcagtaatgccctcggatgtctcgttgtggcccgctttggttacataagcaatagccccttctgtatgcagctttttcaactcgtctgccttaatatcttgaggcgtgatgccaacgatatttttaaatttccaagttactgatcccactgtatgtgaagcaaccgaaccaacaaggccagcgtccggatgctcgtcatttaacgggtgatagaaaacaattgtgcgatccttgcctttgtaagaagcaacttcttcccggtcagttacctgtaaaactacaaatttatatgatttctcttccatcgcttttgccgcttccattctttcgtccgctgtagcatcagcaaggatcaagaagtgccagtccttgtcgaaatactcgtcaaacgcattccgaatggagaatgttgcttgtgtagtcgctccttcttctggcgtttctgtgctgcctccatacgtaccgatggcaacctttgacggtgcattgtcaccctgagcaaagatagccgcagcctttttatatgctgctgtggtttccggatagtctgccttgatagcttctaatgagccatattctttatatgtgttgtgtccgtctaccttcgcaagaatcagaggtgttcccaatcctttaaggctggacggtttcactaagtcaattttgactgtaacgtcactaagtggcatatgaattaccctcctgtattttcaattcgtacagagtcgaaaacctctgcatttgcttctccatgagacacacgcgttctaaagcgtgtatcgaagccgtgacggcgttctgtgtcaatcgtgataaatgtatctcgattgccgaaaccgtcgttcctgacccatgccagcccattatcatgaagcttttgtcgcgcttcagctgttttgaagtacgctgctgtttgttgagcaagggaaatggcctcaatatggctgtttgaaatccatgtaaaagagaaaacaagctcgatgtcttccgttaacactccctgttcttcaatgcctctatgttggggcaaatacggggaagtcacggtatacgtacaaaaaggatagacaggttgtttccctgtaccatttgcaacgataacgacatggcctgttttctctctaatcagtcccaggactgtttgtattatgctgttgtagtccatctgaattgatcaccgcctttaagatatagctgttgaaatcggcatacgtcccataaggcgtcatcgcttcaacatcaaaggtggcgccatcaaaaatcacctgagcttttagaggaatttcgttcttgataaatagctgcctgtccatagatgtaagccggccgccagattgatagacaagttgtgactgtaaaggtactattgcccctctttcatctgacttcgtcggtttcggtggcacccattcgccgagatcatcatatgaaccctcttcagatggaataagcaatgtaaaatcaacgctgtaccgcttaatcagatcagaaaatatgaaatgattccccatcagctttcaacctcataatccatagagccaatcatttccccggtatcaaccaatggatttgaagagcctttctcttcggttgtaaatggatggtttgccgggttccgcaagtctcgggcatacacttgaagccgccctttcgcaagcaggccgactgtttccatgatgtcattcatcgaatcgccattctctaacgctctattgaccagatcctctaccttttgaacgatctcttcctcgttctcgtcccatccagcacggatgaaagaacgctccggaatgttgatatattgagtttctttcttgaggtacagcccttttgcagcaaggtagttccgcatgcgatcagttacagcaatacggcagccaaattcgtgaacagccgcgatcatttgccgttcactgtccaggattccaactttcaccttaccgacggaaccgaggtttcttatgacttctggaatacggttgctatctcgtacccggacgtttctacgtgccattagatcacctcagtgccctaaagcgtatttttctgtagggtcggaataactcatgaacaggattgagcctttcttcatcagctgcataggatctactcatgcctccaattgattcagatagaacaccggacgggctttctctgtcaatcttaattaatagggcaatccccttttttacggccggaggaagagacacagtattatctggaccaacaaagagattgttgcagtatgccatcgcatatgaaatactatcttccagatcaatttgcagtttggcatcctgcgatgtgtcttcagctggaatccctaacctgacttttaattctgccaagtccatttttctcattcctttcaaagaaccggttcatatgtcgcaaaacatcggcaattaatatcattggatggatcaccgctttgtcccggcgcttctgctgttacatgaataccatttttattgatgccaagatcaaacaactgattgaccatgcgttcctgcccttctaaatggacatgatccgcatgttttgtctcacggactctttcatcgccaacgttgtgccaggtctttttcatgttgatgccccgtgactgagcttttttagcagcgtcaagcgttgctttttcccttgtgcgatgcatttctgtattggctatgcgcttcgatcggttgtaactcaggccgacatctgtctgcagctccttcgctatctgagcaaagcgtttccgctcaataaaaccgcgttcgattgtcttgttaatctgctgtattgtctttttgcgatcagtttcaatggctttgtccatttgtttacttttaatagcctgctgaacgtctccgggagcccattcagcaggtaaattcatctgattcagtgttgcttttggctgcgcaagtttgatccctaacgcagccagaacgccaaatatcagccagctgtaagatgattcgtaggtttcttcaaggaattctataatcatagctttgactttcgctgaaagatcactaatcaacgaggtgatttcccgctttatacggtttagatcaccgtgtcgattagcgtcagcaagtgtcggttcttcgatttgatcaagcttgacgaataacgcagtcagctttgacagcacctcttttgaagcacgctgaaaaagccgcttgagtttccgtaagaattccttagttttacggttcaacggcttcaaaagctctttttcagtttgttctttatccaccgcttaccctcctactcctcggctgtttctttggcgtcagactcttgtgtgtcctcggcttcttttttatttgtgcccttgtccagcttatatccaagtcccttataaattacctcgaaagcacgttccgtcacttccaaagagtctctccccttcttgatcctaaccattaggcagtggcacctccatcaacagcagggactaaggctgcaaaggcatcctctgcaagagtagtgaatccgacttccatagttgctcgaagtgcgaacatgtcacgctcgaataagtttagaggttcgccggcttcatctacagttgttgtcaacgttgcatcctgagaaatggtatattcaatgtcctgaagaataccataacgcgcatagtcccaagcccctgtaataaggtcagcttttgttttatcccatgatttgctgtcaacaaacccaataggcaacccaagagcttgaggtgttgcatctgctgtcacttggttaaatagtggcagcccgttattatcttttgcagcgcgtaacttttgacggaaacgtctaatagttgtaaatgcatcaggatctttgtctgcatcttctacaagcgccattactgcagcgagatcgtcataaacagttgcccctgaacccgcgccagtaccagatgtgatcttttggccggacttgttgactctttccatgattgatacacctgtctcaaaaggcgatcccaccccaaacagtgcggcttggtcaaacttgattgcaaaagcttctctaatagctgattgcatttgagtaaagaagtcagcaactgtgtagcgtaagaattcttttgaaactggaatgataaccgcaagtttcttcgatgtcatttttgctgtgagccatttggcgctgcttgtttgaatgcgttcaccttcaccaacccagtaagcgccaggtccttctgctaagtacgtgaatgtctttaccggttttgtcatcggttcatatttagcaagctgtgtgattgcagatgtctgcataaattctttcaacacaatttctgcttgttcttctgggattttcccagttactgcatcttgtagtaatactgttttgggattaaatgttggcataatagccctccttattttctgatatttgcttggttagcgagtgccccaatatcaaccgccccgccagctggtgttggatcacctttttcgaagttagtgccgctctctttgaatttgatatctacagcattttgaactgctgcattgaatgtctcttcaaacttactgagattggcaagtgttgtttcctcgtcttcgccaataaaatagtcaataactcctttaggcagcttcttttcatccgctacattcaaggctttattgaccaatgcttcacgatttcttgctttttctgcatcttctatttgttttttgagcttctcaatttctaattcagccggagatttatccggattgcgttcacgaattttctcttcaacgatgctatccaaattgtttgccttccatgttgcaagaccttttgtgaagtaggaatccaggcgtggctgaatgaatcgttttccctcttcagtttcaaggaacccttccaccttatctgctgatacggccgaaagttctcccacaaatgcttttacttgttcattgtctttattatcttcgagaaattttttcacttcttctaaagttggcattacgtttcttcctccttcgccctctacagtacgcgcctgttatgagtgcatgaaaaataagcctttttaaagtcatgctcaggacaaatacagatgatcactttgcaacctctttgaagtcatcctcatgtcgattcttatgccagtttctcgttgtattgtattcatttttcgctaattcccattgccatatatctatttcagcaggcggattctctccatttgacaacgcaattgctttctccatagctttttcgaatgtagggtagattcctaccttatggggatagcagtcataataatcatcactcgtgtactcaacttcaaagaacgtcattacttacacctcgaatgtcatcattgtccttttcatcctcaaaatcataagcatcttgttcagctttcattctctcaatctcgtattgcacatcatcgacaatagagagtgttgaaaggcgtgtctcttcgcttacctgacctttaagttgtccggatgtctgagcctcttccaagagatttgacggcagattgcgcttgaatgagaaccatacctttaaataatcacctgctgatacaagaccttttttcgcccatgctgagcaaagcaatttgtactgataccgaagggcagcagtcgttttcctctccatcgtgatgcacttattttcaagggccatcagcttgtatttcattgcaacgcctgtcacattcccgccgaatgattcatcagagaaattgaccgactttgcaaaacgaagaatgttttcttcaagcctgttcagatggttttcgatcatggtgtcattaatgtcttttgtcaggaatttggcatcatcatctttcccaaacatttcaagcacaccggtctttttcagttcttggatgtcttcatcatccataccagcgccctttaaaatcaaataagctagccgtagctgttcaatctcgtttgatgcatctgaaagtgtgcgatcgtatgcatctataagtttaattaccttttccacgtcgcccatctgttcatcattgttaggcaacccgaataaaggacaataatcaaacaagtggagcttcttctctaataaagtccagccacctttttgtttttcgaaaaaataggccatcttgtcatcgtaaaaagtggctttttcacgctctatgctttgattattgacccaatcaaataccttataatatctaagtgcgaaagaaggctctgtgatgtcattctcagcaataatgacaacttcccatggatttacattcgcaactcttaccgagccgtcaggagcgatatacacaagtctagcaccatatccacaaatagctgctttcttaccccattcgctatcagcatcagcaatgttatttatggtgttaaagttattgatttgctctgccaaggccgtatttttgttttccccgtctttctccgtctcgtatgagattggatggccgaacatatacccaacctttgtatccactatctcagcatcaaaagcattattcaggcggttgtttaccagatggtcaatacgccgaacctttcctgtttcaaaatcatcgaattgagctgcctcccgctgtaagatcggcacaccggcaacactagccatatatcgttcatactgagctatggctttatctttgatcggcttatgctcttcaataatctgttcaatgattggaccgtctatctcattatttcgaagataatttaaaaacttgttcatgttctcacccctttcctttgcgtctcataggtttgttgtgtgtataaatggcatatcggatagagtcgagcacatcgtcccactctttaactggctcgcctgtatttggattccaaacatacataaagatctcttttttaaagcgactaactttatcttcaacaataaaaagcagatcccgtttgaacagccgcgccacttcttcgatacctgaaacaactgccttatcagcatctaacgcacgcaacttctctctgcgaaaacgtacgatgtgttcaggccgagctgtatcacaatagaaattaatgttgccgtaccgctctttgatgtctttcgctaccttcacccagtagtcaatctcttcgtgccgcttgcaatgttcttcaagcaaataaaaacacccttggtcatcttgtccgattacgacaatagaacccgggtgatcatatccccagtcaacaccagtaaagtatttagtgaagttgacttgtttatcttccatttctttagaactgatatagtgcttgtctttgttaaaatccttgtatattacgccttccggagcaacccagtagccgtaaatatccctgtccgtaaacatgccgctcggtgttgaagcaacaatactttcgacatactcaggatcaagaaagttgttatcaaacaatgagaagtgaaaagaacggatattcagcctgccgtttttcagccgctgcccgtctttgtcgatataatccgttttgacggtgtgcattgggttttcagggtttgtatccatcatgaccattgcacccttataggagcaacgagaaatgacttccttcacgaatgaatcatgcagggcagtcgcttcgtttaggaatgcgccagctgatgtgaaaccccgtgcctttttccatgagtctgcatttgcaccatcaaagcaataaacacggtttccgaatatctcaacggcattcgctttatcaaggcgcaattcttttccaaggatcagttctaaatcatttaggatattccgctttatagaagcctgagttgccccgccaatgataaaagaaagccccatgttttgatatttgctgatgtgcccgaggaacgtcaaaaggagcacgaatgttttccctgcccttttcgccccgctgcatattaagattttcggctgctcttcaataaagctgttccatacttcttgttgcttagagttaagttccatgaggtttcaccatcttccgaagcatggcagcaacttcattttcttgagagtttccgttatcaccatcaatatctttcttcgccttctcgatattcaagcgcatttgctccaatttaaggcgacgttcgtcttcttcatgcgccagtagaacaaactgttttatcaagcttctgagctctcccattgcccgagattgagcattcaggaatgtggcctgacgatcccaagcgaactgtatttcaagttcttcctcaacaatagacttttcaaaatactcgtttccatcttcgtcctcttgaggttgataaacgtattttgcttttttctgttcttttacaagatcatctttatcttgtacgaacatgataggctgcgcccgaataatggctgcatattgaatctgtatctgatcccatataatatcagcaggcgaccgttcctgaatctcttccatgatttcaagcgtttcttctggcaggaatttagagaaaaagccgtgagtcatagcgttttgattcctctgtggtgcgccgccgttattccctaatgcattcttattgccgggtggtgcgcctgccttttttgtgtgcacacttttttcagtgggtgcacccttttttctttcccaaccatgccgctgtttccacgattttatggtgttcactgacaccccgtatttctcggcaaggtccttgtatttcatacctttgacgtaatctttctgcgcctgaatgtgcttctcagccatctacattcaccgccgcccccttttgaattgagttgttttggaaaaaatattccctctaaaccaccaccgtgctcaagccgttaaccgccaattgtctatcctgagacttaccggaagcagtttacagagaacataaaaaagagccatatagtttaatggctcttcctttattcaacaatttcaatatgtgtaatttgagttgggttaataagaatagattcaccaagatcaatcagacgatttttcaaaactctttcaccatccaattcatcatgaaaatagtctataagattttccacatctttcatatcttcataagaaatttcaaaagattttttattactcattagtataaacactttcataattttcacctcccacctaattatcggataaggagtgtgacaagggaactatttgcaaaatttgtcgaacgaaagcgcccttcataaataggtggcagtcgtaagacaaaaaaagcatccccaagggatgccttatttaatcaaatctcttaattctttaattgtatggaaccattcgcaaaatttgtcgaacaaagacaaaagaatatcactttttgtttcttttttttcggttgttttttgtctgtgtttctatttgcacactttcagtttttttgtttttcttctcttcagtttctaattcttcaattgcttcttctaatagcattttataagtacgtagttttccataataattaagattttttgtcacaatccatatccagagaccgattaaaattaataataaaatcccgttaaatattactatataccttccgaaggttaaacccgttttcacaatagtatctaaaagttctgtcggatctatagaatgttttttatcaatatttactgctatgttggagaaagcattaaaagtgttaaaataaaacgtaaaaatacctattagaacactgatgagactcgtaaatagtgatgtatatatagcaaatgggatagttttaaaagaggaaatgtctcctgaaactttaaggctgttattcaatctggaaattaatttttttatttgttttggttctagtttctttttgactttctttttaaaatcttctccacttttaatattggaatcctttttataaggtgtaccgaaatgctctaagtatttagatacatgagttacttcgtcaaacggaatttctctaatttcacgattatctttttttcgataattaaacacttttctccataattcaaccgctaattttttcactatatcacctcctatattttatcggacagacgacaaaacttcgaattgcttgcaaaatttgtcgaacgaaagctctattcaaaaagtcagtcttaagacaaaaaaagcacccttcagctgcgggtgctcatttcttcctatgcttctggaattccaatatatcctctttaataaaaagcctgtccctcggcatttctttaaccggttcaagttgaccggttttaattagctgattgagatattgacgagtaaagcccaatatttcaatcgcttcacttgtattaacgatctcctcattcaagaactttttaattgcatcacgctctttaaggctgtacaccaagcatcatcctcttttttctcgatatttttgataaagggaaattgacttttccacaattgaaacagcaaacaaaacaattatgcatatatctaaagttgtctttaatggactggctgcgacatgctgtcgaacaaataacatgtatcccaaagcaagaaggacaaaaatatcagttgacattcttagtttttccatttgtttgaaagtggctgctttcatcgttatataattatttgtgtcacttatgttatacttggagcaagggagaagctccaccttctccctcggctcaaaatcatctacgctttcttggtcgtctgcgtcttttgattttgggcttttttgttttaagcttttctcttatgataagagctttttcaaagatagtgagtgctgtaagtatgatgcccagtatcactgcaattttagccactttcgttcccccctttctatactttaattatatacgattactttactcacgtcaagttaatttagagaattttttcctgttttctcataaaaaacacctattcatgctaaacagaataggctgtgttctgctctatttttcattttcaaacgggaacgctcaatgtttttctggactgttccttttttaatgttcagcagctgggcgatctcctcgaaagacatgttttgcacagtatgcatgatgaaaatgtccttctctctttcagtaaggacagaaagggcatcagcaattctttctttgtcccagtcgcttacctctccttctggctcctgattgatcgcatactcttctggcattgcatcaatgatacgaggatcagcaagaatcgttctttgataaacgtctcttctgtcagctccccggcgtgctcccggttgtctcccgttctgcagccattcgagagtgaattcaatatcgctaatcatactgccaatgattttcttatcattcttttgttccgctgtcatttcattttctggtgtttctgagaatgcccggtacatctttctcgcttcttttaacgctcttttgtattcaatgattaaatcctgcatgtttgtcctcctcttatttacgcttaaaagcgccgcctttgcatcttctgagtgtttgcctgtctcgcctgccaaaacctttcagaacgctccttcgcgtttttactggactttttcttctcttgtttcatttcgtccctccgttcaaataaaaaaacggacaccaaccaaagtacagaattctctgtacagtgatcagtgtccgcaggctttccatcttggactttatttaaattaaatgttttttcgctatagtaaataatggcatagctatatcaaataaattcttctcaccaacttttttatagactactatatttccatccttcgttaacaagacacttagaatatcatcttcgttttctattggattcggcacatctaaacgcaaagcagaaataattccatcactttcttcataagaactccaattttgactcgcggtaacagtacccccacctaaataggcaacttctacatcggctatttttaaatctctccaccaaccaccttttattgcagcattatcattttcttctaattcttcttttagttttcttaaatctatagttatagcttgtgagttatatcggttatccccacgtcccacagtcccatcgattaatcgcttaatcccgtgttcaataattgattttttggaaccccaaaaatataaaaaatcatcatctgatttagccacattgaaagtttcatcagcagaaatagcaattatatcgtgtgccgttccatcttccaaatagccttttcctgtaaatgaatctcctattggatgtattacttgatacttttttaaatcttcttctgtatattcagtactacctaggtttttaagcgtagttttaaaagattgactttcagaaccagtattaaattcatttgtttctaatggtaattgttctgggaaattgattaatctctgcataataattgattgcggcatttaattctctcctcacaaaatcaatttaattactttgtccaaagctttaattaaagatgttctttgatttgtcaccaaaactatattcttttcatgcgcacttaactgtacaccaggattacttttaattttaatattaaaagataatatatcagatggcttaacctctttaataaagtgttttttcatgaagtcaacttttttagtgtttttagcaactttcattgtatacttattctcttccacccctaaatcatcacaaatcctctggtaaaagtgaactataaaatcttcaataatttcttgtccatttttatactttaaagtagcagatgcacttacattcaaattcatctgaccaaaattatctgtttggataatcgagaaataaatcttgtatggtttaatgtacattttaacgttgttaaacttatcaaaagagacttcgactaactcatttttgcgccctgtatgacctttattttttagtaaatcataaaaaattgtttggacttccgtataatcatctttaattttttgtagagttgaattttcgactatgttaaaaaccgcttgaaaatctatatcaaaattatcgaaattaaagtgatttttcacccatctaaaacccactctaaatttttgggatttgtcatatatagttttaagtaaagctgctaatgttggtaaaataatgattcctgttgcccaattaaatccttttgtgtaaaactgaaaaagcattgttgcaagaagactgagtagcattaaaacccacatcatctagcccccttatctaataatgtcattaattatagccataagatattgcttggtaaacattctttagaattaaatcaatcaacttcctctgtctaatttacaacaatgtttatcttttccacagttttcagtacaataataccatttattttcatattttttctaatttttttcaccctttttcacccctccatcgttttttcttttttgatgaattattttcaaatctctatttcctcctcaactcaacgcccatgctgcagccgcatttcgggcagcgtgcatctgggcggatttttatatctaattcgttgtgaccacattcaggacagctgtattcgatcatggtgtcaccccctattcccagccgactgcaattgcaaagaataaaaccaaaaccatcgccccgattagccagccatttgtcttatcacgctttgcaatgattgtttcatcaccgatcattttcaaatcgtctgactttgccacgagaactggtatgtaatctggatgcactttcaaatattccgccgcctgctcaactgtcatcgcttcgtctttcgtggctttgactgcccgctgaagctcaacttgtaaaggaatcatttcgcatcaccttctttcccaagcgaatcccaatcaaacgtttcaagaatcttaagcaaccgttcaacttttggtgctctccaagctgtcatagcgtacgtatgagcttctgaagtgtaatggtgcttgttcaatttgatgtggctctttgcttctgcttttgtcaaaaacattgtatttggttgtataatgtgaacctttctttctggaattaattctgcttcttcatcaatgtatttttgaatccactcaacagcatcttcatagtcgtcctcaatttcttgcaactctgttaaggcttccttagacagctcactatcttcttttatttcttctagataatcatcaaaaacataggcttctgcaatatatggcaggtatacagaataacgctctgcgttttcctcccgagcttcaacccattcataatcaccgactgtccaaaaccgtggtgcagcttgagaatcacgatcctgtgttttcaattcattttgaagctctttcaaaaattgaatatccttgttcatttcacatcaccctccaattcattttgggcaactgttatcgcgaaattgagattggtaatgatcttctctaatgcctgtttgtatcgtttcctatccccgcttaaatgctgaatgtccttttgagcctgccggaattgatgaaccgttacttcctgctggcgtttgttttcctcgatgatttcccgctgtttttctactgattgaattagaaattcttgatcctcaagaatagtggaccaattaacatcaattttctttttataaagtgaagttgctattgaaaatctattttttatttcctgtaatttatccatgccgttcctcccccgcaggggaaagcccctgctatttgattttgaaacctatttcgtgatcgactcgagcaaagcttccctttgccgtttgaatgattgttttgccatgctccggggcttccaagacatgtgcggtgccctggctcccgtctaaaacgatgatctgtattttgcccgactccattgcctgttcgattgttgtatctttgcttaaattaatttctcttgggttgtacattcttagcgccccctgtgctatgatagaagtaccagttcatatcagagcatcggggcatacgcttcggtgctttttttgtgtttaatagtgatccggtttccatccagtcattgtgaatgttggcgatggtttcagatcctcacggtaaacgatcgggtgttttttcacgtattcggccagctgttccggcgtcatcttccattcttcaaccggtcctggcaggtaaggattgatgctttgctgttccatggtatctacctcctgaattgattttgggaatttccgtgccgccgagcttcttgcaatcagaacccattcggctggcgcatgccttaaactgagagcaacgtgtcatacaggccatgagcttatcttcttcctgcacccacaacggccgatcgtctgcgattaccacgtttagcagtggactttcccgcctttcttttgagttttttcagctcgtccagctcgatgaagccgagtgacttatccagagccagcaccttgagtggcgtatcgtaaagccgctcatacagcttgcgcttgatggcaaattcctttgtttcaacgcccttgatgtcaatgatctcgatgctgccgtccaagttatgaacctcaaagtctgcaatatattcaatcttccgaaaagttttgccgttctttttgaatgcctcttgcagcaggaaccgtggctgcagcttaaaatctttgatctgcttgctcaccttgagccatttcagctgctcatagtatttggcttcggcccggctgtcgaacgtgatgccgtctacctgtgtttttcttgcgccgtacttatttgctggcatgtgatgcctcctgaaacttattcttttgttctgcaatctccatttctgacatgccgcagtcaatacaacattcatagtcaggtatttgcaaatgaccttctcccggcatagtgcagtaactcatttccatgtgtttatgttcacaggattcctgacgttttttctgttcagcctctttgacaaccgagcagtattctctttcgtgcaacctagcaccgtgctttgtcatcagccgctttccgcaatgttcacactggtaaagcgtctgattttctaacactttcattctccttacctcccgtcactctcttcccattgctgaatctgcttttcttttgctggcgccgttagtatgattgccggcagcagcatcaccgctttaagcactcggcatcagctccatttgtctgatcttttcctcaagcacctggatagctggtgtgaggtccttgccgcccttttgttcagcaggcccgaacaaatacattcctttggatcctataacgttcgttttctcgttcaatcccaatcacccaatctatgatttaattccatccggttgccctgaatgatcaccgtgtaatacttgcacatctggtaaatccgagagcccagcgcctcgtcaacgtccagcagatcgtccgttgtgagctcagaagagatcagcagaggtttatggttcaggtagcgataattcacaactgactggatctgttcgacttgccattcagttgcccttggcttcccgtcaactggcttgaataagtcatcaatgaacagcacatctgcttttctcatggcgttcagctttgtttccagctggtcaaagtcatttttcagatcactcatgccctcaacgtaagggaagtacaggcagtgagttgatttcttcttaatgagattgttcatgatggccgttaacagatgggttttgccgctgcccggctgtcccagcagagcaatgctattggcacgctctcccttgatcttttcaaagtctttgaagtattcgaccgcacattcataggcatctttaatcatttgaggtttgccatctaatttgaagttgccaaacaacagcttttcgaacttttctgtaatgccgctggctgccatgagcttcgctattttcttttgtttcacacactcacattgtttggaatacgtcgttttccattcccgagccttatccggcgtgcaaacctttcctgcaaggtaatcatcttcaagaaccatttcatcaagtgataggctgtccaatggcttgtgttcttttctcaaccgcagctcagtgtctttgtggatgcggtagatcacaacgccgcgatccttgcactcagagcattcatattcaaccttttcttctgattcggcctgttctgtttcccaggaacgcgatcttgcttgaagacccttcatcattgcttggaacgctgtgtctatactgactgctttgtttattgccatactgttgtttctcctttctcttttggcttaatgggttggacaggatcgcctcaatgtagttcaagccaacgttgctgcctttatttctgaaagcctttttcattgcctcgatgaccttctcttcgccgtaatcatccaccatgtagccgattctttgcgcctcaatggagccgatagaacgagcgaccttattttcgaatagctcaaaagcgtttttcatttttggatcaacctcctgcgtttcttgtggtgctggtgcaagttcaggaacaggcttttcagatggttcctgctccgttacaggcgtttcaaatgagatcagcctgtattgccctgccttcctcccctgcggcttatattcaattcttttaagatcaatcagcatctttcggtgtttgatcaacgtattttcggaaatctcaatctttgcttgcagagtggtatttgaagtggtgaaccactctcgccaccctgccttattgttgatgtgcaaaagatgaaaccataatgcttgagttgtagcagacaacggattcgtttctagccaattcatgaagccgttcatttctttcaggtagttcatggctcacctacttcctttcacacagtgctgtcattccgctgatacggactaaacgtaagccaggttcatttgttctgagatagccttcaacataagcacggaacagctgcgcgcgatttggcgccccttccgtcagccatttgtaacagaaggggatgccgactttaatcaaatgggaggtcatcttcgctgatgtctacaggcttgccgtcaaaaggatcagcgtcctgcgcgcttggtttttcctcagatggttcggcatcaatgatttctggctcagacatttcgtcagtgatgtcaatgcgctctcgttcctcgttatcctcaataactgccttttgcatttcaacagagagtatcccccacttgctgagcatggattttagaacggttttgagtgccatcgcatcccagtccttgccccaaccgaagtccgacttgctaaatttctttttgtgtttctcaacttgcgcctttgtccaatagacagtttttcggaatccatttaaaagctcaaaataagcagcgtaaccaataaccgaatctgattcccgcttttcaaaatcaatatcaatttcctcggtcaacggattccacttttgcaattctccttcatgaaccggtatgcaattgatagatttatattggcccgtccgcaaagcaagctgaatgtatcctttgtaaccaagctgaaattgcgcacggcctttatacggaacgatccaggcataacctaagttcttatccactggcaaatcgagcgttgccgccaccatagccgatgaaattacactcatagggtctgccttttgaagcgtattttcactgttgtacaggctcagaattgacgctgtgaattgagacgctctttttcccagaacttcttcgaatcgattcatgactgctggagaagaaagcaggcccttcatcgttgttccctgctgttgtcctggggcactgttttgtttcttctgaatgctgtttttaagcgtttgatttgtagccatattcagctaacctccttaattccaaagcgcctgaattgcacttcttttgtgactttctcgtatacatctggaaactgctctttcaatttcttgctatcgatccgattagttgaaactgacttccagctagtttgatagtttccgatgaatccatattctgcttccttcatttcatgtttgatctggttttctaattcctttgcctgcaatgacagctcgttgatctgctctttcagctgtaaatactgctgaatacgtgttttattatcagatgtgagatcaacgactttgccgccttctgcttcggcataacgttgcttgagatattcttctgcagcactcgaaccgtcaagaaccggagcctttccgcccaagaccttttcattccaaaattcaatttcggcctgaaagatcattgcaataagctcgtcatcgcgctcaatctctttccaaacgaatttattgccgccgatcagtacagcaaaatatgcttttttatattcaggccccagcactcctagatagtgttggacctgaacaatatagctgtcaggaatctcgtcatcttcccactctttcaggttgtatgccgatgtggttttgcactccaaaatggctttttcgccaacaatcattcgatcaacgtttgccaatataaaaccgtgcttaggatgcctgagcattgcttttctccgccttacttttttgccgctacgtatctcaaactcttttgcaacgatatcttcaaggagtgaaccgaagtaggctgcctcacttcctgattcactcacaggtacttgacctgttttgtctaaccataattcaaacggtgttcgccatttgtttatgcctaaaattacagaagcatctgaaccgccgatgcctttccgtcgctcaagaagccattcgtcccgactcatgtccgctgtcgaagcgaaaacctctgcttgcatcagagcagccccacctttcttttgtaagcttccgcaccaagccgctgccattcccggtagtgatccattgaaggaaaactaaactgcgctttaccgtttttggcgaatacaattgaaccgccgacctgtctcaaacgttgctgatcctccgcacgctcgctgaacgccactttaactgctttagccatgtataaaacctccattgattttcttgaggctatctggtagaatattgatatatgagttttcagatagcctttaattaagtccactctgccaagtgggcttttttattgctcatttttaaattcaaaaccaagatgctcctttaagtaccgctcaaggttttccctcaagatgacttcaccctcagcgctatctatcacgtaatcgtcgaaaggcgttacttcatccccgaaaaaatcctttggtgtttctggctcagtcagcttgtcgtgccaattgtttagaatcatcgggttttcgatcgtcattcatattctcctttctgtaattagctatgcgttcatcccaaatcagataaagttcgctatgatttcggattctttcacaccatgctctgacctccaacgctgtcgctggtttatgaacaaagtgaaccatcatcctaagctcctgcgtaccactgataaatcaattccacgctgtttcagcctcatcgctgcatcatataagcatcccttatttgaaatccgtttaagatcctcaatgtttgctttgatactgccaaggatgtctaaagcttcctcgtagtcgccttctttcaaagagtccagtaatagttcagccaaactttcaactgaatctgatttccgttttacgacttcttcatctgacttcaaaaaatggttgagtttcatacgagcatcgccttcctttcctcttgttttgacatagcaacttgatccattaacgctttccgcgtccatttgtctgcaagctcctgcattttcagaccatgacttcgagataaagcataaaagagagtgtctacagctggaccaaggtcaagaatctctttaagatccgccatcggtagcgcctcaatacggccggggcgttcattcgccaaccagagcgcgatattttcagcagcctcaagggattcctttgtctgtttcataaaattgatcagggctttactggggctgacgttcaacgccggatcgactggggctgttgccctcggatgaagccggaacaagtaatgtacaaggtcaatgtgctcataagcgccgcatatctcaaaccatttgatgcaaagttcaggcgttagtgtggtcaggccattttcaacgtctgatacataccgttgatctttgccgccaagtaactgccctaattgaaattgagtaaatcccattgtctttctaacctctctcataatttttggtaaattatcgagtttatacgggttgttcgacatatgttcgcctcctgtttcacggggaattatttggtaaaatttaagtaatgaaggaactagctggcttgctgttttttcagcttattgatgatgaaggcttgtcccttcggagtgatgcgcattgtcagccaggatttcggcgtcccgtttacttggcgcaccccctgtgcgatctcaaagaaacctcgctcgatgtattcctggtatggctcattcttgttggccatgatcatcttccattcgcgcagcttctgaaacagtcgcttttcaccaatcatgatgccgtttttcgaagcaagctttgccagttctctcacaagcaatgatttttcggccgccatgcaactctgtgcaaagttgaccaatggttcctgaatcttcaatgcttgttcaagttgctgccgttcttcctgctcgctgatccatcgctttgcccggctgactggatcttcgatcatgtaggacggttgagtcattttttgaagctcggcttccatccggttaaattcagcaatgtatttttctttgaacactgctgcttttgcacccgtataaccaaaaaccaaaaatgcgagtccatcacgtttgatcagatattttttcaatgatcgtcctgttggatcttcatattcactcaacgaaaaatttcgttcagtaaaatctttagagcaattcagtgtttcaatgctttttattacatcggcgtgtcgttttccgaatacctcagccactgttaggctgtctgttacggcttggttgccttcaataaaaacaatttgattcatgctgttacctccttgcttgtccaccaaaaaaaggtgaagcagataattaagcgtgaagccttaattcttttttagaagtgaagtacggctcaagagctttacggaaacactcttctctgtccatcgttccgtaatattctttgcccatcttgatgtttgttgtttttttcttagtttgtttcgccatgtgatcacctcacgtcagtgtattcgtgttggacggttggactaaccaagaaattaagcagattcaagatccccattcttcatttcgtggcattcttcttcaaaaaaaagagtccaatcaaaatctaaaatgtttgcgatcttttttgcgacatgaggtctgacattcctttcgccagtctcaatggcaccataagttgatcttgcaatgccaactttgatggcaagttgttcttgcgttaaattggcatcttcacgtttttttctgagccagtatttcaattaggatgcctcctttcgttctacatatcgtggcttatgaatacatattaaaccacgatatgtagaatgtcaaacctttttattaaaaaacacgtaatattttcttcatttcgtggcatgtcgtttaattccacaaaatgtagagttataatgaatttagaatttacctttaaaagttagtaggtgatattatggcgattaaacataggctagtcgaattgaggaaaaagcaagggcctcatgtgaagcaagaagatgtggctaaagctttaggtatagcacgctccacttacggtgcttatgaacaagggaaacgcgaaccggaccacgctactctaataaagatagctgattattatggagtgactatagattacctactaagagatgagccagagaatatgaaaaatgaaatcttcaacgaacaagcaagaaagattcttgaagatcctgatactctggtagctgctgctgatggaaagataacagcttcaattttagaggcagctcaaagaattattgctgagcaattaaaatcaggtagacaacccggagatataaaaaacgggaacaaaaaataattacataacgatcgctttatctttatttattattattgtttagtttagtttagtttaattaatgctgaacacttcgcctcaaaatttgaggtaaactattcagttgaaaccatttcaacctcaatttttgaggtgatccatgaggttatttctgcattcaaccgcaaattttgaggtaaaacattcagggtttttcactcagattttagagagaaaaagtaaaaaaatcctttatttagacgatacaaagaaagagattgcacttcattataaaaggggaaattacaattgaaaaaatggttattaggtattggagcattgactcttagtttttctttagctgcatgtagttctgactcttcaagtagtaatgaaaaatcttcttcaagcaagacaagctcacttagtgctgaggaccagtttaaaaaagatgcaaaatcatatgcctatgaaaaagtaaatagcgccggcattaagaaagggacaaaaattgtcattgaaggcgatgttacttatgcagataacgtcaatgatgatggggatacagtttctaaaaatgttgagtttactgtaagtaaaaatagcgatggatctgaagtttacacagtaagcaataaaagcgctgataagttcaaactaaacgatacggttaaaatttatggtacatatgaaggcagagctgaaggaagtgcccttcctaaagtgaaagccgtttacgtcgataaaattgataaagaaaaagagcaagctaaacaagatgctgcactaaaagaacagtttgaaaaaactggcgaaggtgatattgaaggactgggccacgttaaagatatcggcgttggatataacgacgaagtcggaattgacggtaaagacactcctataaaacctgttacgatgggcagcatgaagctttatattaacagtgtcgacgttctcgaaattcaaccagatgatgatgcaaaatcactttattttaatgatcaagataaggttcgggctattgttgtcgatatgaaggccgaaaacacttcttctaaggacgtaacgtttgaccctaaccaagctgttattgttacaaatacaggagaacagcttgaatctgaaatgggattaatgggtgaagtaggcggagacttcttagggaaagttaaaaaagaaggccaggcatggtggatacttaaagataattcaaaagatatcactagtttgaaaatgattatttctcctccaagtgatgcaaaaacctatgatgatttaggaagcgagaaaagactagattttgatatcttgagttttgaagaagctaagaaaaaagattcaaattaaattgagcccctaaagggggcttttcttttcgctaaaaagagaacatacgtttgttcgccttcgacaaaataggtgataagatacaataaagcccatgataaaagtcacatctttggttatttaagggaggtttcatctttgagatacactaacagccatttagaagattggattgaacagctttacagggagatcaatattacaaagccacatgagattaattttgatagaattgctcaggccttggacatcttaattgtttacaatccggaaacgagttttgctctgcgattcaacggcatgtatacaatttctttagattcacgaaagacacgacaggaacagtggctggattttgctcatgaggtttgccatgattttagacacatgaacgatgataagatcatgcccgcttcgtggaaacgttatttagagtaccaggccaattattttgcttatcacttttgtatacctactttcatgctccgagcaatggacatcccccgtaatctatacgacgcagttcaagtcattgccgatgccttcaaggttccagagtcatttgcgatgacccgcatcaatatgtacttcaataaaaaacgactcatcatataaaaaagagcctctaaagggctctaagtttgcgaccggtatgcataccatttgaaatatggtttcgaacggttttctcactgataaatagctcgcttgcaatctcctttgttgtcttatcttgaacgagcaattcgaacacttctctttctcttttcgttagcagcggcttcgattgaaattctttctccttcaagtattgtaaccctccttgctaaggtgagagcgaatcagaaacgaatgggttttgatatagtcgagatatcatatgtaagaagggcgcaggaggtgacgtttacaagataattagtttatcgtgtatgaagaagcgtttctttctcctcatctgtccagctgacagctttgccgctttcctttgagacttgaaccatcacgactgccccggtgaagcagggttcgccttcgaggttctctccgagatagtgcaaggtaagagatgaactgccgactgcgcttgttttcacatagatgcgcaactcttcataaggcatgacttggcgcaaataatcgcattgctggcttgccacgactgtcatggtctgtttgttttcactcatcatattcagctttttaaaataagaaatccgcgcctcctcaaaatatataaaaggggttacattattcatatgcccaaacatgtctgtctcggaaaatcttacggatacctcattgaaaaaagaaaaggatgttttccattcttgaaacggcatatcaatataagcgggaagcttcatcttttttcatctccttattgtttaaaaaaacctctcccatgcggaagaggttttttcttcttatactctgtcgcttccgaagaaattgcggaacgcttgtaagtttgtatctctattcaaggctgcaatcgaagtggtaagcggaatccccttcggacaggattgaacacagttttgcgagttaccgcaatctgcaaggccgccttcatccattaatgcttctaatcgttcagatttattcatggcgcctgtcggatgcgcgttaaacaggcggacttgcgacatcggtgcaggccccatgaacttcgatttgctgttcacattcgggcaagcttcgaggcagacgccgcatgtcatgcattttgataattcatatgcccattgacggcgtttttctggcattctcggccccggtcctaaatcgtacgtaccatcaatcggtatccatgctttaacttttttcaatgaatcaaacattctgctgcgatcaacctgcaaatcacgaacgactgggaatgttttcattggttttaaacggatcggctgttcaagctggtcaataagcgccgtgcaagactggcggggttttccgtttatgaccattgaacatgcgccgcatacttcctcaagacagttcatatcccatgtgacaggggttgtcttctcacctttgacattaaccggattccggcggatttccatcagagcggaaatgacgttcagattcgggcggtatggaatctcaaattcttcatcataaggcgtgctgtcagctgtatcttgacgtgtgataataaatcgtatggttttttgttcactcatgattatttcgccaccttcttcttcgagtaatcccgtttccgaggcgttatcagtgatacatcgacatcctgatactcaaattccggcgcttcatacgggcttacatgtttagccattgttgttttgagccattcatcatcattacgttcaggataatccggtttataatgggcgccccggctttcattacggttgtatgcgccaagggtaatcaccctagcaagctgaagcatgtttgagaactggcgtgtgaacatcgctccctggttgctccattttgtcgtgtcattgatgttgatctttttgaagcgctccattaactcctgaattttgtcatccgttttcaaaagcttgtcattatggcggacaaccgttacgttcgccgtcatccactcaccgagctctttgtgaagaacataggcattttcggttccgtccatactcataatatcagcccatttttcttcttctttcttaacgtgagcgtcgaataaagatgaagacatgtcttccgctgaagattctaagccgtttacatatttcaccgcattcggaccggccaccatgcctccgtaaatcgcagacagcagggagttcgctcccaagcggttgccgccgtgcatagaataatcacattccccagccgcaaacagtccagggatgtttgtcatttgatcgtaatctacccataaaccgcccatagaataatggaccgccgggaagattttcattgggagcttacgcgggtcgtctcccatgaatttctcataaatctcaatgatgccgccaagcttaatatcaagctctttcggatctttatgagacagatcgagatataccatgttttcaccgttaatgccgagcttctggttcacacacacatcaaatatttcgcgtgtcgcaatatcacgcggcaccaggtttccgtatgccggatatttttcctccaggaaataccatggtttgccgtctttatatgtccacacgcgcccgccttcaccacgcgctgattcactcatcagtcttaatttgtcatcgcccggtatggctgtcgggtggatttgaatgaattctccgtttgcataatacgctccctgctgataaacgattgatgcagcagatcctgtattaatcatggagttcgttgattttccaaagatgattcccggtccgcccgtcgccataatgacagcgtctgaacggaaggattcaatttgcatgtttgtcaggttttgtgcaacaattccacggcaggttctgtcatcatctaaaacagcgccaaggaattcccagccttcgtattttgtgaccagacccgcaacttcgtatctgcgcacttgctcgtccagtgcgtaaagcagctgctgtcccgtcgtcgcaccagcataagcagttctgtggtgctgtgtacccccgaatcggcggaaatcaagcaggccttcaggcgtccggttaaacatgacgcccatccggtctaataagtggatgattgaaggcgccgcttcacacatcgccttgaccggcggctggttggcaagaaagtctcccccgtataccgtgtcatcaaaatgttcccacggagagtcaccttccccttttgtattgaccgctccgtttatgccgccttgcgcacaaaccgaatgagaacgtttgacaggaacgatggaaaacaacttaaccgccattcctgattccgctgctttaattgtcgccatgaggccggcaagacccccgccgactacgataatgcttgattgactcatgatagcccctctccctctagtaatctagtactcttaaacaaatgcgaaaatcgcttttaagcctacgtatgacagtgcaacaaaaataatcagcgtaacgtatgtcgaaattctttgagaacgaggcgttaccgtgatgccccatgtaacagcgaaagaccataaaccgttcgagaagtggaaaattgttgataaaacaccgacaatgtaaaaaccaagcatagccggagagctcaaaatattcgccatcatgtcgaaattgacctcagcgcccatttgtgcggcaatgcgggtttcccacacgtgccagctgacgaaaatgagggtgatgataccggttacacgctgcaggacgaatagccagtttctcatgtagctgtattgacctgcgttatttttcgcagtaaacgctatgtacacaccataaactgcatgataaattaatggtaagaagataataaaaatttccaaggcatacctgaaaggcagactatccataaaatgagcagcgctattgaatgcttcagcgccccttgcggcaaactggttgacgactaaatgctgaataagaaagatgccgaccggtatgacgccaagcaaggaatgcaatcttcgaaaataaaactctctgttcccagacattactttaccccctgtttgataagtgcgaaatgtgctaaatctcttcccccacttctttcaattgtaagcactttattaagatttattgacaatttcattttactcctccctcaaaagggcgtcaagaaaacgcgtacataaattataattttccgaattggttagttgattgaaaaattttattttatcaatatatatttcttacttaatttttcataagaattacaggatcattctgtaatcctcccccctgtttgagctataatatacgcaggagagaggggagacagatatgaagtctaaatttgaagcatctattgacaacctaaaagaaattgaaatgaacgcctatgcctacgaactaatacgagagatcgttctcccagatatgcttggccaagattactcttccatgatgtattgggcaggaaaacatctcgcccgtaagtttcctcttgaatcatgggaggaatttccggccttctttgaagaagcgggctggggaaccctcaccaacgtaagcgctaaaaaacaggagcttgaatttgaacttgaagggccgatcatttccaaccggcttaaacatcagaaagaaccttgctttcagctggaggctggttttatcgctgaacaaattcaattgatgaatgatcagattgccgaatcatatgaacaagtgaaaaagagagcggataaagtggttctgactgtgaaatgggatatgaaagacccagtgtaatcaaaaaggcggtgactgcatagtcccgcctttttgattgtcattacacagctgaagggtgttttgaaagctcaaatgcatcgtgaagcgactcgactgctttcaccatgtcattttcgcttacgactgttgacactttgatttcagatgtgctgaccattttgattaaaatgtttttttgcgccagtacagcaaacatttcagccgctacaccgggatttgagaccatgccggatccaacaatggatactttagccaatttgctttctgtctcgattttctcaaattccagcgcgtctttatactcttcaagcaccgcaacggtttggtctgcatcttctgttttgacagagaaggaaattccagtcttgtcctcggcctgcgtttggataatgatatccacgtttatgtttcttttggcaagtgtcgtaaaaatagtagacaaagttgtcaagccgctagtcagcccgtaaatggttactcttgtgatttgatcttcaaatgcaatgcctctgacaattaaattctgttccatggatgattcctcctcaattaatgttcccgcttcggtttctgtacttgaacgcacttctaacggcacttggtaatttttcgcgaactcaactgctctcggatgaagaacgccggcgcctaaattggcaagctcaagcatttcatcgtatgagatgcccgcaagttttctcgctgatttcacatagcgcggatcggttgtaaacacacctggcacgtctgtgtatatgtcacatttatcagcttttaaagcggcagccaaagcaactgctgttgtatctgaaccgccccggcccaatgtcgtaatttcacaatcctctgtcattccttggaagcctgcaacaatgacaatttttcctttttcaagctggtctgctaaaaccgaagtgtcgatatctgtaattctggcgtttccgtgaatggcctccgtacggattcccgcctgccagccagtataagacacagcgtcatagcctttttcctgcaatgccattgaaaggagtgaaatcgtgacctgctcgcctgtcgccagcagcatatccatttcgcgtttgctcggctggtcagaaatagcttttgcaaggctgaccaattcgtcagtggattttcccattgctgaaacgacgacaacgacttgatggcctttctgtttttctgcaattgcgcggtttgccgcattttgaattttttcgactgagccgacggaagtgcctccgaatttttgtacaataagacccatgtattaccaccctttacattttggttcgtgcgggtgaggagaaagagcgctttgtccacaataaaaaaagcaatgagaggaatactctcattgcttatcaattaatcatcataaatgattatgaacaacgagatagccctccaagaaaatgatttcttgacagccttacatttattcaatgcacggccagcaaataataccgatggggttttatttgcttcggcgacgctcccctttcagcctttttcacagaatccatctttctccaaaggcatactcttgaagttcgcacctctatcttcaccatataacacgatctaactatgaaattagttcacattttatcagatcttatttaaaaggacaacattatttttgcaatttgtcgtaaaggagctgagccgccgctgcgggaacaccggcttttttgatgtcctcaaggcttgcttccttcatttttttaacggaaccgaaatgctttaacagcattttctttcttttctctccgatacccgggatgtcgtccaaaacggattgaaacgcgctttttccgcggatttgcctgtgaaaactgattgcaaaacggtgcacctcgtcctgaatgcgctgcaggaggtaaaattcctggctgtttcgttccagatacaccacctccagcggatcaccgatcagtaaatttgaggttctgtgtttttcatctttcgctaaaccggcgatcgggatatccaagccgagttcattttcaatgacatcccttgctgcgttgatctgcccttttcctccgtcaatgataatcagatcgggcagcggcagattctcacgaagcactctcgtatagcgtcttctgacaacctctctcatagaaccgtaatcatccggccctgtaacagttttgattttatatttgcggtattcctttttgtatggtttgccatcgataaacacaatcatcgcggaaaccgggtttgtcccctgtatatttgagttatcaaacgcttcaattctgtgcggcgtataaatatttaatgcctcacctagtttctgcactgccccgattgaacgctcctcgtcccgttcgattaaagagaatttttctttcaatgcgattttcgcatttttatgggcaagcatgagcagttcttttttcgggccttttttcggctggtgaacgtttgtttccagcagctgctcgatcatagattgatctacgctgtccggaactaaaatctccttcggaaggaagtggttgttttttgaatagaactgcccgatgaacgtgaggaactcttcatctgcttcctgataaagcgggaacatgctgacatcgcgttcaatgagctttccttggcggatgaaaaagacctgcacgcacatccagcccttatcgtacgcgtacgcgaacacatcacggtcgactagatcgttcatcgtcattttttgtttttccatcgttgattcaatatgggccatttggtcacgaagctcttttgctcgttcaaactcaagattctcagcagcttcatgcattttctcttcaagctcttttttgacctcattatagccgccccttaagaaacgtgtaatgctttcaaccagctctctgttcgtctcttcggaaatatcctttacacacggagcgaggcattggcccagatgatagtaaaggcacactctgtccgggagcttggagcattttctgagaggatacagacggtcgagcagtttttttgtttcccttgctgcctgtacattcggatacggcccgaaatagcgccctttgtcttttttgacattgcgggtgacaatcagccttgggtggcgttcatgggtgagttttatgaaaggataggttttgtcgtctttgagcatgacgttgtatttcggatcatgctttttgatcagattcatttctaaaataagcgcttcaagattggaggacgtcacgatatattcaaaatcctcgatttccgtcacaagcctttgggttttcgcgtcgtgagaaccggtgaagtaggagcgcactctgtttttcagcacttttgctttccctacgtagatcacagtctgctgccggtccttcatgagataacaacccggttgatcaggaaggagggcgagtttttctttcagttgtttgttcatatgttacccttccttatgtttaatcctttatttccagtttaacacgaacgtttgtttttctctatggttcacaattggcgaataaaaaaagcgatccctcaatcggaatcgctctggcatgtaagcagcggaaaattaaagatgtttgtttacaagctcttgaagcgcttcttttggtttgaagccgactgaagtttcaactacttcgccgtcttttaacacaagaagagtcgggatgctcataacgccgtattttccggcagtttcttggttttcgtctacatcgatttttacgattttcagtttgtctcccatttcttgatccaattcttcaagaacaggtgcaatcattttacaaggtccgcaccaaggagcccagaagtctgccagtacgacgccttcgcttgtttcagctgagaaagattgatcagttgcttttacgatagccattattgaattcctccaatgtgaaatgatgatttttagtatagcatctcccattcgttcacgctattttaatgcttacaaattattttttcctgatcacagccggtttactcatttttatatggttgaatgggatatgctctttttttaaaacacaaatctgataatggccccaatcactacaattgccccaataatcattaaaatggtacgaagcataagatcacatctcctcttcactgtcatgtactttaccatgccctgccggagctgttttaaaacctgaaaaagagcgccggcatgaagctccggcgctcttgcgcgattaagaatcagcacgcagcgtaagcaagacgactgacattggcgggagttttactttcagtttgtttttgctgagcgtgtattgcctgaaggattccggtttgacatgatgaggatcgtcaaacgtgttatgcgcattcattttttctgccgtaagaatgactccggaatggtccgctgccttgtgtaggcccctcagctcgatttccgcctccgctttgttttggtgatcgatgttgcaaattgtgatattgatatcgccttcagtttgtttcgacgctgaaatgctgatttgcggaagcgtttcaccgttccattcatagtcggcagacattgtctctgtggctaaaagagaagcgtcctggtgcaccttaaacatattgaatacatggtacgtcggtgtcaaaagcatccgctctccctcagtcaaaatcatcgcttgaagaacatttactgtttgggcgatgttggccatttgcacccggcggcaatgctgatggaaaatgtggaaatgagaagccgccaccagtgcatcacgaatggtgttttgctgatataagaaaccgggattcgtgcctggctcgggatcaaaccacgtgccccattcatcaataatcagcccgacccgctgctccggatcgtaccggtccataatcgtgccgtgtttttgaatcaattcatcgatgtatttggcttttttcatcgtaataaaccattcatcttccgtgaattctgtggctgatcctttgcccttccagaaatcccccggaatcgtgtaataatgaagactcaacccgtccatcaggccagcggcttttttcataagcacgtccgtccaattaaaatcatccacatttgcgccgcctgcaattttataaatgtcattcccgctgtaattgcggacataagtctgaaaacgccggtacagatctgcgtagtattcgggatgcatgttgccgccgcagccccagttttcattgcccacgccgaaatatttcagcttccaaggctcttctcttccattttgctttctccagtctgacatcggcgtgccttcttcaaatgtcatatactcaatccactccgccatttcctgaacggttccgcttccgacattgccgcaaatatatggctcgcattcaagcagctcgcaaagcatcataaattcatgcgttccgaattcatttgattcaattgtaccgccccagtgagtgttcagcattgtcttacggtcaccgacaccgtttgcccaatggtattcgtccgcaaaacacccgcctggccacctgaggacagggatgtgcagctgtttgagcgcctccagcacgtcctttcgtatcccgttgatattggggatgtctgagtccgttccgacccagatcccctcataaatccctcttcctaaatgctcagcaaaatgaccgtatatatttttgttaattgttccttttacgatatctgtttgaatcactgcttgatgttcagacatgcctctgatcattcctttcatacggatatgaaaagcaccacagtcaaatatgtgatctgtcttttgcctgaggagtcagcatgaatgtaagcgcttttaaagtaaccatattatatatgttcgtacatgtcaacgacattttctattgtttttatatttgtacgtatgtatttataaatatgaaaaaatcccgaacttttaaagtccgggatttcctttatgagtgtatattcaattgtttgaattcctcagttaataacgggacaacttcaaataaatcaccgacgatgccgtaatccgctattttaaagatatcggcttcggggtctttattgatggcgacgatcaccttgctgtttgacatgccggccaaatgctggatggcgccggaaatgccgcatgcaatgtacaaatccggagtgacgactttcccggtctgcccgatttggagagcgtaatcgcaataatcagcgtcacatgccccgcgagaagccccgactgcggcccctagcacctctgcaagctcctgcagaggctgaaatccctccttgcttttgactcctcggccgcccgcaacgataatttttgcttcggagagatcaacgccgtcagctgtttttttcacgacctcttggataacagtgcggaggtcagtaagagaaacatcaatgcttttgatgctccccgatctgctggtgtctttttctgaagcttgaatgttattggggcgaattgttgcaaagatcatcggatcggttgaaatgacgcgttcaaaagctttccccgagtaaatcggccgtgtgaacacaacattccctccggtaacgcttacatctatagcatcagaaattaagcctgtttgcagccgggcagcaagcttcggtgaaagatccttgcccattgccgtatgcccgaagatgactgaatcaggattttcttgctcgataacacctctcatgacctggctgtacccgtctgccgtgtatgttttcagcttcgggtcctcagcggtaagaactttatctgctccgtaatgaataagctcttgtgcaatgctttgtacattttcaccgatgagaacaccgatgacttccccatctcctgaaatggttcttcctgcagctattgcttcaaaggtgacattccgcaattccccatcgcgtatttctccaagcacgatcactttttttcccattctaacatccccctgtttctttgaatgtccaagctttaaatgactttagcttcgctgcggagcaatgaaacaagctcttttgcctgttcagcaggctcaccttggagaagcttcccggcttcttttttcggcggcagaaaacgttcaatggttttcagctttggttcagcatcctcttcgtccaggtcaagatcatcaagttcaagctcttcaagcggctttttcttagccttcataattcccggaagcgatggatagcgcggctcgtttaagccctgctgagctgtgacaagcaatgggagcgtcgttttgattttttcaacatccccttcgacgtccctttctgcttctgcatcagtgccgttgatttcgagtttggtgatcgtagtgatacacggaatgtccagcagctcggcaagccgaggcgccacttgtcctgatcctccgtcaatggcaacatttccgccgagaatcaaatcaaactcctgatccttcatatagtggtataaaacttgagaaatggaatattggtcgggttcatcaagatcatcttctatgttgattaaaacagcttggtcacaacccatggcaagcgccgtacgcaattctttctccgcttcttcaccgccgaccgtgacagcggtgatcgtgccgccatgcttttccttcagctggatggcttcttctatcgcgtactcatcatatggattaatgatccattccgctccgtcatcctgaatctttcctgtttcaatgacgattttttcttctgtgtcaaacgtccgtttcatcagtacaaatagattcatgatcatatccccttttattcgcctttgaactgaggctttcttttttcgagaaatgcctggatgccttccttggcgtcctctgactcaaatgcttccccaaatcgctttgcttcaagctttaagctgccttcataggaatacaccttgttggaataaagaagttcaagcaaagatgccagcgtttgcgggcttttctctgcaaacttagcggcaagtgcttttgctttttcaatcacttctgcctcatctttcgctccaattgaaacaagtccgagatcaagcgcttcttttccggatatcggttctcctgatccgatgagctccagtgctttggctgtaccgacatatctcggaaggcgctgtgtccccgcaaaacctggaatgataccgagattaagctccgggagccccagcttagcatcttctgccgcgattctgatgtgacaggccattgcaagctccagcccgcctccgagagcagcgccgtgaatcgctgcgataatcggttttggaaaactttcgattctctccattaactgctggccgcgctcagcgagcaatgaggaatcctcattgcctttaagcgatgtaaattctttaatatcagcgccggctgagaaaaatcttccctcgccgtgaatgataatgcttcgtacgcctgcatctgtctcacattgatcaagacaggaagacagctcttctaatatccggcttgaaagcgcgtttgccggcggattgtgaatcgtcaagactgccacaaattgatcaaccgcaagtgaaattgcattcataggacagaactcctttacttattgtgaattccggataccaataattctaaaacgctgtttgaaagcgcaacgagatcgtacttttggtcattcatcacccaagttgtcacagtttcgtcaatcgttccaaaaatcatctgccgggcgaggcggacatcgaggccttcttttatttcgcctgattgtataccttccgtcaaaatgccatccaaaatatttaagtagccttttaatatttcgttgattttttggcgcagctccaagttggattggcggagctcaagctgcgtgacaatcgcgagattatggtcacccgctaaaagggaaaaatgctttgaaatcacaagcgccaatttctctttcgctgttgctttttctttaatgtcctcttccatccgctcaataaattgacccattttttctttgaaaagagaaattaaaatatcttctttgtttttaaaatagagatagatggtgccgtccgctactccggcttgtttggcaattttggatacctgtgactggtggtagccgttttctgcaatgacttctactgctgcatcaataatctgcatatactttggccgtttttgcttcaatgttcatcgttccttcctacagaaatgaatgactattcattcataatttcatgataagaaggattttcaggtttgtcaagtttattcataggcgttctctttttttatttgatatgatgattttcggtttcttcttcaagtaaacgccttcttaaaatttttcccaccgccgttttcggcagctcttttctgaactcataggctttgggcaccttatagggagctagtcgagatctcgcaaaggcatccagttcttctgcatcggcttttgcgcctttctttaatacgacaaatgcttttactgtttctcccctgtaggaatcgggaacgcctgcaacaacaatttcctggatggcttcatgttcataaagcgcttcttctacctcacgcgggtaaatattgtaaccgccggcaatgatgatatccttcttcctgtcagcaatatagaaaaagccttcttcatccatatagcccatgtccccggtgaacagccaaccatctctcagcactgcggcggtttcctctggtttattccagtatcctttcatgacttgcggaccttttacaatgatttctccatgctcatacggagcggcaagctcacccgtctcttcagaatagatcgcagcgtccgtactcggccaaggacagccgatactgcccggcttgttttttccccagataaagttggcgtgcgtcactggggatgcctcagacaaaccatagccttccacaagctttccgccagtcaccttttcaaatttctgctttacctccacggggagcgcggctgatccgctaagacagcttttaatggatgacagatcataatgctgcaattcggggtgatgcaaaaggccaatgtaaattgtcggtgcgccaggaaagagcgtcggtttgtgtttgtcgatgattttcagtgtttcgagcggatcaaacttaggaagaagaatcatttcgaagcctagtttaatcgaatagttcatgactgccgtcagtccgtagacatgaaaaaatggaacgatgcccagcactttttcagcgccttctttcacgtcatacatccaagcggcgcacatttcagtatttgccaaaatattttggtgcgtgagcatgaccccttttggagctccggttgttcctccggtatactggaggacagcgatatcatgctcaggatcgatcttcgggattgtcaggagttcagttttttcctgcttcatactggaagcgaacgtgtgaatgttagctgttttgtcaaagtcgatatgcactttttgtttttgcgtcagcgggtaaagaatattcttcggaaaaggcaaatagtcttttacgctggttatcaaaatctggtcaactattgatagcgttttcatttttattgccttcgggaaaagcaaatctaaggtgatgattacacttacctgagcatctctaagctggtattcaagctcatgctcggtataaagcggattcgtctgcaccacgatgccaccggcaaacaagacgccataataagaaatcactgtttgcgggcaattgggcagcataacagccactctgtctcctttttgcaggccattgcactgcaaaaaagctgcaagtttaagagcatccgtcagaatgtcatgaaaggtgagtttttttccataaaacgatattgcggttttatcagggaatcgtgcggcggagtctgtcaggatggattgcagggttttattcggcaacgggagctcatgcgggatatcgttgggatactcggcaagccacggcttttgagactgcataaaacctccccctttcgattttagagttccaccttatcattatagcagatggacggcaaaaaaaagaaaaagaaaggtaaatctttctttttctcataatatgaacagatatataagaccaattaacaaaaagattcccgccgcggcgagcagtacttttgcaagcttttccatttattctccgtccccttatattccggctgccaccacaaatgaaagcccgacagaaatgacaaatgaaataaagccgacagcccggttatcattttcgatttcctgatcaattttaaaccgcggagtcaaaaactcaaaaataaagtagctgatcagaagcataacaaacccgtaaacgccccagccgatcatttgcagcagcgaattatgctgggagatggaatgctgaaatacgtttgcgatccccaaaatttttccgccggtcgccattgccaccgcaagatttcctttttgaatctcttcccagtttttataagccgtcaccagctcaaacacagtcaaaaagaggacgaggcagagaaccgcgacactgtaatatgccgcgatttccacaagctcgttttcccaaaaatcactcatggccatactcccttttattttagttcaacaaccgtaacgcctgatcctccctcacctgcttcaccgaaacgggaacttttgacgctgcggtggtttttcagaagatcctgtacgccttttcttaaagcgccggttccttttccgtggatgattgacactcttggatatccggctaacaccgcatcatccaagtatttttcaacccggcttagggcattttcatagcgttcgccgcggagatcaagttcaagcgatacgtgatagtcctttcccttgaccgctgtaatgattttttctttttttggctccggagctgatttgataaactccagatctttttcttttactttcatctttaaaataccgatttggacattccattcattgccgcctgttttttcgagcaatgttcctttttgcccgaaagtgaggactttcacctcgtcgccaggcttaaagtcgcgtttttgcgctttcggcttctccggtttcttggacttttcaaaagccggcatagcgccttctaaccgtttcttcgcgttaatcagctcgtgatccttgaaggatttgtgttcttcttttatggagcgcaattcatgaataatgtcctcggcttctttcattgccgcttttactttttcagcagcctgctgttctgcctcttcaagcattttgtcttttttgctgttaagctcgatgatttgctgctgcagctctttatgcagtttttccgcttcttttctgattgattctgtctcagaaagctcttcttccgcacgttttttgctttgttccagcgacgcaatcatcgtatcgacttcgttatgctcggccgtcatttctgacttcgcctgcccgatgatatggtccggaagcccgaggcgttttgaaatttcgaaagcattgcttcgacccggcacaccaattaaaagtttataggtcggtgacagcgtttcgatgtcaaattcaacgctggcattcatgacgccttctctgttatagccgtacgccttcaattccggataatgcgtcgtagctaacactcgtgcattggtgcgatgcacgtcatccaagatgctcatggcgagggccgccccctcctgcggatctgtccctgcaccaagttcatcgaaaagcacaaggctgttttcattgacctgttctaaaatgccgacaatattcaccatatgggatgagaacgtacttaaactttgctcaatcgactgttcatcaccgatatcagcgaatacgtgctcaaatactgccgcttctgacccttcatctgccgggatatgaagacctgactgcgccattaaggttagcaggcctaacgttttaagggtgactgttttccccccggtgtttggccctgtgatgacaatggttgaaaaatcgcggccaagctcgatgtcattggcaacaacttgatcaggcggaagcaatggatggcgggcttttttcaaacggataaagccggtgtcgttcataatcggttttgtcgctttaaccgcttttgcatatctagcttttgcaaaaataaagtcaagcgtctgcagcacttgcaaatctagaaatagttcctctgtatactctgccgttttctctgtcagcacacgcaaaatccgttcaatttcttgcttttctttcactttcgcctgctgaagggaattgttcatatctacaatcgcctgcggttcaatgaatagtgtcgcaccagaggatgaggtgtcgtgcacaattcctccatagctggatctgtactcctgtttgaccgggatcacaaagcggtcattccgaatcgtaacaatcgtatcagacagcattttcgatgcggaagaggaacgcagcatcgactctaaccggtctctgactcttgattcgagtgttctgagctgtgtgcggattcctcttaatgtttccgatgcatgatcaagcacttctccgtgatcatcaatgcaggaattaatgtcccgctctaaatcggacagcgtgataagctgttcagcatgctgatggatcagcggaatgtcgacaccgtcttcagccatttgggtgataaaatgtttcatttgtttaactgcataaagcaggcctgagatttcagtgaattcagaaggactgagaacactgccgatttccgcccgtcttaacgctcctctgatatctacaaggccgccaaatggcgcttggcctctcagccggataatgtcagaagcttcgtctacttcatccagctgttttttgatttcgtctatagaagcagaaggcttaagctcgagaagcatttcttttccgagcgatgaagcggcatgcccaataacctgttctttcactttatgaaattcaagagctgataatactttttgctgcacgattgtgtgagcctccttacttaatcgttgcgcttcagaaatgcctctacgtctttaagcgaccgggcattcagaacgtttttcgtttccgtccatcctttgcgcgcggcagtaacgccagttttcatatcgtctaacatctcaatattatgggcatcagtattaatcaccaatgtaaccccttgttcgtttgctttcattaaatgctctgtgcgcagatcaaggcgcgcagggttggcgttgagttcaagcgccgtatttgttttcctcgcaagctcaatcagctgatcaatatcgatttcgtaaccggcccgtctgccgataaggcgcccggtcggatgtgcgataatgtcaacatgcttgtttgtcagtgccgtctcaagccgtttcataatcacgtgttccggctgattaaaactggaatgaatcgatgcaataacgatatccatttccgcaagcacatcgtcatcataatcgagcgtaccgtcaggcaggatatccatctcaacgcctttcaaaatacggaagttttcaaactctgcattcagcgcgtcaatttcttttgcctgctgcttaagtctttctgcagtaagcccgttggcgacctttaaatattgtgagtgatcggtgatcgccatgtattgatagccttttttgatgcaggcttcagccatctctctgatcgaaaatgcgccatcgctccacgttgagtgcatgtggagatcacctttgatttgcccgagctctatcagttcaatgctgtcgctgtaggtttccacttcctgtccgctttcacgaatttccggcggaatcagcggcaggccgaagtgcgcataaaattcacgttcactcggaaatgttttgatctctccggtttcaactgtctcaacgccgtattcactgatccgctcgccgcgttctttggcgatttggcgcatcttaatattgtgatcctttgatcccgtaaaatgatggagtgttgtcggaaactgctcttccgtcacaagacggaaatcgacgcttgtttcatattcaaaggaaaggatgacggacaccttcgtatctccgcttgcgattacgcttttgatgtttggcagctcaagaagctgctctcttacttcagccggatgatctgtagcaatgatataatccagatccttcaccgtttcccgcgctctgcggagacttccggcacgagaaaatttgatgatatgcgtaaattgagaaagatgctcctcaatttcccgcgcgatccggagggcgtatccgatcgggaaccgttcaggctgttttccggcttccccgagcgcctgtaatattttttcttccgattttttgccgaagcccgcaagaccctggaccttttgctgctcacaggcttccttcagagattctgcatcgtgtacgccgagctctttatacagctttgcgatttttttgccgccgagccccggcagcttcaataaaggcacgagtccttccggcacttctttctgaagcgattcgagcgtgcttgactttccttcatctatatactctttaatgacgctgtacgttccttttccaatgccggacagcgacatcatatcgtccatttctgataagcttcggtcgtcctgttccaaggctgccgccgcttttcggaaggcagatactttaaacgggttgtcccccttgagttccatatagactgcaatggtttcaagcagccggataatatcttttttatgcatatcataaccccagacgttcacatatgtttccatcatacttgaaaaaaacttctccggacaagagaagtttttttatgccccgtactgtgtccacagctcttgtaaaagccctgacaagtacggtgtatggttaatgatcacatttgcgagagacgattgtcccatcatttgctgcaacgcatctaccggcagaacggatgcgacatacagcagcacaaatgtaaataaatagacttctagaaaaccgagaacggctcccagcatctggttgatttgtttaatcaccggaatgccggctacaatactcaggaacgagccgatgattctcagtaagattttagcaatgataaataaaacgataaacgcaatcgcattatagtacgctgcttccaaattccccgtaaaaaaagaaagagccggctgtcccgctgaaaaatcgggtgcgggaatccaatgtaaatgcggtgccacgtttttatagaataaagccgcaaaggcaattgataaaataaagctcgtcaagcggataaactgcaggataaaaccgcgttttaaccccagtaaagtccccatcaggagcaagattaagatgatgatatcaagcatagttgttcaatccttttctttaagctgacgctccagtttttcacatttctcttgtaatttgacataatcgtgcaccacatttaccgctgtcagcactgcaagtttatttatatcaaggtatggatttttttcattgatttctctcattttatcatcaacaattccggcgacatacctcatatgggctctgctttcttcaccgacaatcgtgaagtgctggccgtaaatgtcaacggttgtttttgtttttttgccgtcagacaacgtttctcctccattccgcgagaatcctagttcttatcataacacgtttattaaatgaatggaaagacgagcctcccgctgttatgatacactggtatatacagcgaaaagtgtaaaaaaaggagattattacgtgtcccattcagtgataaaagtatcgttgtctgctattgaccaaatgaaaatgacgtacagcggttcacttacagcctctgttccgcagggagccgtttttcaggcaaaaccgcccggctgtaccattacagcatataaatcaggcaaggtcttgtttcaaggaaaaaacgctgcggcagaatccgcgcgctggggaacagcagagcctcaggaaaagaagaaaacggccaaaaagccggctgatccccgctatgcccctccggcagatatcgccggaatgtctgttatcggttctgacgaagtcggaaccggagattactttggcccaatgacggttgtatgcgcgtacgtcgacaaaaccatgcttcctttaatgaaggaactcggtgttaaggattctaaagatttaaaagatccgcaaatcatcgagattgcccgaaacctgatcaaaactattccatatagcctgctggttttaaaaaatgaaaagtataacagcatgcaggaaaaaggcatgagccaagggaaaatgaaagctttgctgcacaatcaggcgatcacacatttattaagaaaattggatggagtaaagcctgaagccattttgattgaccaattcgctgagccaggcgtctacttcaatcatttaaagggcagagacattgtgaaggagcggacctattttagcacaaaagctgaaggtattcacctggctgtcgctgctgcttcaatcattgcaagatattcatttttaatggaaatggataaactatcacgcgcggcaggaatgacgcttccaaaaggggccggtccgcacgtcgatgaagcggccgccaagctgatcctcaaaaaaggggcatctgcactcagaacctttacaaaactccatttcgccaatacgcaaaaagcgcagcgccttgctgataaaaaacgttcatagaaaaaagcttgcagatttctctgcaagcttttttctcagcctcttaaaacagcttgatatgtgtcttctaacgctttcagcactttgctgtgcgcctttgtcacttcttcttcagtcagtgtttgttcagggttgacatactggagtgagaaagcgactgacttcttgccttcctccatatgttcgccttcgtatacgtcaaagacggttacctctttcagaagcttgccgccagcctctttaatgacgctctcgagctgtccgcttgtaacggttttatctgttacaagggcgatatcacgtgtcacagacggatatttcggaatcgccgtgtaaacaagcggtgctgtttctgctgcgagcaacgcatgaagatcgagctcaaatacgtatgtttcctttatatccagttctttttccaatgaagggtggacttggccgatgaagccgatcagagaaccattcaataaaatgttcgctgttctgcccggatgcagctgtttgcgttcagactgtacaaattcaatgctgtctaggacgttgagtttgtctaacagcccttccacaattcctttgacaacaaagaaatcaactggtttcttttcaccctgccatagctgcttgcgccataatccggtaacagctcctgctacgcgttctgtttcaacaggttttgtgtcctcttccttcgttaggaaaacggagccaacttcgtacagtgcaactgagtcagtctgcctcgcaaggttgtaagaaacagaatcaagcagattcggaacaagactgtgtctgagaatgcttctttcttcactcattggaagcgcaagcacagtattcagtgatttttcaatcgcaaacgctgccgctttcttctcgtttgtcagtgagtaagtgatggcctgtgataagcctgcgccttcaaggaagcgtctgactttacggcgttttgcctgatatggcgttaatccgcctgtagttcccgctgtctcaggaagcgtagacggaatgttatcgtagccgtacagtcttgccgcttcttcaattaaatcctcttctattgtaatgtcgccgcggcgtgatgggacagtcacaacgagaagttcatccgcttcaccgaccgtaaaaccgagacgtttataaatgctgatcagttcttctttactgatcgtcaggcctagaacgctgctcactttgtcagcagatacgtgaatgttatttgcttcgattgtcaggtgatcttcctcaactgttccagcaagcacctcaccgccggcatacagatggatcatctgcgcagcccgttctgctgcaagacgtacgcgcgccggatcaattcctttttcaaatcttacgcttgattcacttctcaaaccaaggtctttggaagccttgcgaaccgtctgcccattgaaatacgcagcctcaagcaaaatcgttttcgtatcttcctgaacctctgactctgctcctcccatgacacccgcaacggcctgcgctttcgttccgtttgtaatgacaaggtgatcggcggacagcttacgttcttgatcatcaagagttacgatcatttcattctcagctgcttttcttactacgacttccttagagccaaatctgtcataatcaaacgcatgaagcggctgtccgtattccaacaggacaaaatttgtgatgtcaacgacgttgttgtgcggacgaatgcctgcattcatcagctttgtctgcatccaaagcggtgacggagcaatcgtgacatttttaatgatttttgcagtgtacagcgggttcgcttcttgatcttcaattttgactgaaatgtaatcagacgcttgttctgaagcagccgggtaatccgtttgcggaagctttacctcagtgtctaaaatcgcggcaacctcgtaagcaacaccaagcatgttcatggcatccgcgcggtttggcgttaaacccagctcaagaatcgcatcgtcaagctgtaaagccgctaaggcatcgcttcctgtttcagcgtcattagggaatacgaaaatgccttctgcatactccttcgccacaagtttgctttcgataccaagctcctgtaaggaacagatcatgccatttgattcttcaccgcgaagcttggcttttttgattttgaaattgcccggcagcaccgctccgactgttgcaactgcgactttttgtcccttatccacattcggcgcgccgcaaatgatttgtacaggggcttcagctccgatatccacaaggcacttattcagcttatcagcattcgggtgctgctcgcgctccagcacatggccgatgacaacacctttgatgccttctcctttgtattcaattccttcaacctcaataccggctcttgtaattttttcagcaagaacagccgggtccatgccttttaaatcaacataatcctctaaccatttataagaaacaaacatccttgcatcctcctcttacgcctgtttaaactgcgaaataaatctgacatcgtttgtatagaagtggcggatatcatcaatgccgtatttcagcatcgcgatgcgctcaacacccattccgaatgcgaagccctgatattccttcggatcaaagccagccattttaagcacgttcgggtgaaccattccggcaccgaggatttcaatccagcctgttcctttacatactgagcagccgttcccaccacatttaaagcatgtcacatccacttctactgaaggctcagtaaacgggaagaagcttgggcggagtctgatttcgcggtcttgtccgaacatttttttcgcaacaagttcaagcgttccttttaaatcactcatgctgatgtttttgtcaacgacaagcccttcaatttgcataaattggtgagagtgcgtcgcatcatcgttatcacggcgatatactttacccgggcaaatgattttaacgggacctttgccttcatgcttttccatcgtccgtgtttggacaggggaagtttgcgttctcatcaaagtctcctctgtgatgtaaaagctgtcctgcatatcgcgcgcagggtgttctttcggaagattgagcgattcgaagttgtaataatccgtttcaacctctggcccttcctcgactgtgtagcccataccgataaataaatcttcaatttcttcaatgacaacagtgagcggatggcggccgccgactgcaacagggttccccggcagcgtgacgtcaattgtctgtcctgcaagcttctgtttcatttcctcttcttcaagcttctcgtttttgtcagcaatcgcattggcaatacgctcccttacttcgttcgcgagcgcccccatttttggacgttcctcagcagaaagcttgcccattccgcgcagcacttctgtaatcggccctttttttccgagatattgcacccgaatatcattgacaatcttcaatgagcttgccgcttctacttgttctaaagcttcttgttccagctgttttagcttttcttccattttgcatcctccttttatgtaaacaaaccgtcatatgtctttggaaaataaaaaaaacccgtcccttttacaagggacgagttgtggccgcggtaccacccttatttcagacagactgatgctgtcgtcagcttcattgacataacggaatcagattccggttcacctttacgcgcagtgtacgcggtcccggcgacaactcaagaggtgaagccaatttccggctgcgttaaaaatgctctcagtcagcggcattttctccctggaaagcagttgatcagaaattgaggtcctctgtcacggtttttgaaatattatgttctattatagagaaatccaacgcttggcgcaacactatcctcgcaagtgatacacgaggatggcagccgcaaccgcaacgtttagtgattcagcctgtccgtaaagcggcacgtacaggttcaaatccgttttttccagcaatgcagcatccacccctgcaccttcatttcctacaatgagcgcaaaggattcagactgaggaatctcctggtaaggcgctccgttttgcagcgccgtgccgtatacttttacgccctctgccttcaattcgtccacatatgaaggcaggtttcttctcacaacaggaatatggaagtgagatccttgagcagatcgcagtgtttttccgttaaaggcgtccgccgtgccgtcaccgagtacaaccgcatccaaaccggccgcatcagccgttcgaatcattgtgccaaggtttcccggatcttgaacagcgtcaatcagcagcaccttgcgtgccgttgccagcttttcttcaggcatatggcacacagcggcaatctgctgcggcgtttcggtttcagtcacagctgaaaacgcatcttcactcagcatatagcactggataccagtctcaagatctgaaggaatcttcgtttcatcctttacaaggatttctttcacaatgcccgggcttttcaacgcctcttcaacgaggtgttctccctctatcagaaatgtatttgtttttgttcgttctttttttgtgtgaagctttttccaatccttcactttttggttttttgccgattctatttgtttcactgtctatgtggcgctcctttttttaacatgatgttattatatcgcaagaacagcacataataaaccaggtgcagggttagaatatacgtattacattttagaaaaaggagcgttttacatggatcttaatttacgtcatgccgtcatctccaatgtcaccggcaataatcaggagcagcttgagcatacaatcgtagatgcgattcaaagcggtgaagaaaaaatgcttccagggctcggcgttttattcgaagtcatttggcagcacgcatccgaaagtgagaaaaacgaaatgctgaaaacgcttgaaggcggattaaaacccgccgaataagacatgaaaccgggtgacagcgcccggtttttttcttatataataaaaacatgatgagggggaacgccatgtttttacagccgttattagcgaaaaaaattattgctgaagtaaaaaaaatgtacgaacgtgaagtcattattgtaaacacggacggtcttattatggcaggcacaaacgatgaacgtgtcggacaatttcatgagggagcgcttatctgcgcaaaagaaagacgcagcgtgattattacaaaagaagatgaaacaagattaaaaggagtgaaagcaggcataaacctccctgtattttttgaccatgatgtgatcgccgtcttcgggctgacaggtgagcctgcagagattcagccattcggagaactgcttcgaaaaatgacagagctgttcattaaggaatcacggcatttagagcaatcccagtggcgtgagagaatgctggagtcctttatgatcgattggctgcaactaaaggagtggtctcccagttttcttgagaaagctcagcttcttggtgttaacctttcctcccggcgccaaatgattcttattcaggggtatgagtggtcacgtcatgatattgaacaaatggcacgcagctggaaatcctcgtaccctgcggatttgttcatcaggtggggaaatgaacggatcttgattaatcatgaagtgccgcagcatgaacaaagggatcggcttttacggaagatccttcacatttgttcgtttgccaataccgcaaacagccaatttgcagcagctggcgccggaagggctgtcgcaagctccagcctgacagattcatacgagcaagcggaaaaagcgctggctgtcagccttaagcgaaaaacgcccatatttgaagaggatctgaagcttgatatgtgtctgacggagatcagcccgggaacccgaaacgaatttccgcaaagagtattaggagaggcgctagagcatcaggaacttatgaatacgttacggactttctttcatcacgatttgtctttgaaacaaaccgcagaagatatgcatattcatatcaatacattgcgttatcgtctggctaaggctgaacagctgacgggtttacgttttgaccgtaccgaggacgtcgtcacgatgtacgtcgcactctattttttagatcaagatacaaaatagagagagtttcagtttcattttttgtatgtttctccatggaaggctttgctttttttcttttacaatagattgaaagcattttttgacagggggatgggtgaaatgatcaccaaggatgtaaaggaacagctgattcaggtctccggaccagaaaactttgatgactcgaatgccggccgtctcgtctattcatatgatgcgacgcctcagtatcagtctatgcctgatgccgtgattgctccgaggaatactgatgaagtatcacgcattttaacaatttgcagcgaacatcgagtgccgatcgttccaagaggatcagggacaaacctgtgcggcggcacgtgcccgactgaaggcggacttgtgcttctctttaagcacatgaaccagattcttgaaattgatgaagaaaatttaactgccacagttcagccgggcgtcattacgctggatatgatccgcgcggttgaaagcaaaggtttgttttatccgcctgacccgagttctatgaaaatatcaaccatgggcggaaacatcaatgaaaattccggcgggctccgcggattaaaatacggcgtcacccgcgactatgttattggactggaggttgtgctcgcaaatggtgacatcatccgcaccgggggaaaactcgcaaaggatgtggccggatacgatctcacacgtctttttgtcggctcagaaggaacactcggcattgtgaccgaagccatcgtcaaacttgttccaaagccggaaacaaagaagacgttgcttgctctttatgaaaacatcgatgccgctgctcaaacggtatcggacattattgccgcaaaaattatacccgccacgcttgaatttctcgaccagcctacacttttggtgattgaggattatgccaaaatcggacttccgacaagcgcaaaagcagttctgttaattgaacaagacgggccatttgaaactgttgaacgggatatggaaaagattgaggcgatctgcaaaaaaggcgacgccgtttccgttcagaccgcacaaacagaggaggaagcgtttgccctgactgaagcccggcgttctgcactttctgccctagcccgcctcaaaccgacgacgattttagaggatgcgaccgttcctcgctcagaaatcgccaatatggttaaagcgattaatgatattgctgctaaatatgatatttccatctgcacctttggtcatgcgggagacgggaaccttcacccgacatgcacgacagacataagaaataaggatgaaatggaacgtgtcgaacaggcttttgccgagatttttgagaaagcgattgaacttggcgggacgataaccggagagcacggagtcggggaaatgaaagcgccttacttggaaatgaagctgaaaaaagaaggcattgatgcgatgaaagcgttgaaagcggcatttgacccccggaacatattaaatcccggcaaaatgtttgcgaaagatgccagaaaacgtgtggtggcggaaagatgacaacagaaaaagaaatgaaacagatccaaaatgaatttaaagagcgtatggatgaaggagagttattaaattgtatgcgctgcggcttctgtcttccttcctgtccgacctatatcgaatcgggatttcaggaaacacactctccgcgtgggcgcatcgccttaatgaaagccgtagccgacggtatgattgaaccggatgaagatgtcgaacggtcgctgtcactttgcctcggctgccgcgcctgtgagcctgtatgcccgtctggcgtgaaatacgggcagctgcttgaggaagccagagatattatccaccaaaataaaaaacactctcttggtgaacgtgtcatgcgaaagacggcttttcacgagctgtttccgcatcaaaaccgcatgcgctcagctgtaagccttatcggtttgtatcagcgttcaggactgcaaaccgctgtgcgaaaatcaggcatgcttcggatcctgcctgagcatttgcggacgatggaagctgttcttcctgatgttccaaaaagcaaagacatgaaacatcggccgcgtttcctgccgtccattggccccatgaaaaaacgggtcgcctttttttcgggctgcttaatggatacgatgtttttaccgactaacaatgccacattgaagcttttacagctggcaggctgcgacattgtcatcccgcctgaacaggcttgctgcggggcgcttcatggacacagcggtgaaaaaaacacagggaaagagctcgcgaaacaaaatatcgctgctttcgaagcattagacgtggatgcagtcattacaaacgcaggaggatgcggagcctttctgaccgaatatgatcatttgctgaaggatgacccggaatggtcggagcgggccgccgcttttgttcaaaagctaaaggatttttcttccgttttggttgaacttgatttccatcaaatggacttagcgctcgagacgcctcaggtcgttacctaccaagattcatgccaccttagaaatgtaatgcatacgtcgcttgagccccgccagcttcttaaaagcatcaaaggggctgaattcaaagaaatggagaaagcagacagctgctgcgggtcagcgggaatttacaacatcgtcgaagctgaaatgtctatgagaatactggacagcaaaatggctgccgttaaagcaaccgaagcgattctcattgtaacagcaaatcccggctgcctgctgcagatgaagctcggcattgaacgcgaaggactaagcggtaaagtcagagccgttcacctggctgatttgctattggaagcagccgggcacaaaacatcatgagaaagcccaaaacagatattgttttgggcttttgtgcgttattccatcggactgcaaatttcgatataatgtccatccggatcagcgatataggcgaccgtctgcccccatggtttcactttcggctccccgataatcgatacgccttgttctctcatccttttgatgaccgcttctacattttcagtaacaaacccgatttcaaatgtgtttgaagcagatgtatccggaatgtccagcgccgtgatgtctctggcgctttcccgcgtattaagcgccaatatcgtagaccctgtttcaaattcgacatacgtgccgtgttcagcacgaatcggcagtcctaaaatatcccggtaaaaatgaatagcccgctggctgtccgatacgtatagaataagatatttcattgatagattcattgccaacccccctcagcatttttcaatagtccttctagcccggtatagatgcttccatccttaagctcggatctttccacatctgcgcccattttttcacagccgccacgataatgatgaagcctaacaccagcatgatgatagataatacgccattcaatacactatatcctgctgcttcaggattgagatacacattgcgcaccatccaatagcccgcataattgacagtgacatataaataggcaagcgggataaggcaagtcagaatgtaccggcgtttatcagcgattttcagcacgatcgtcgctccgataatcagccccactgaagccatcagctgattagaaacgccgaacagcgcccaaatggaaccgatatctcctgaatacagcaagtacccccacatcaaacaggcaagcgcgctggcaaatacagagcccggaatccagtctgttttcttcagcggtttatacacctccccgaagaaatcctggatcaaataacgggcaacgcgtgtgccggcgtcaatcgctgttaaaataaagaccgcttcaaacataatgacaaattggaaaaagtatgaggccaaatggctgaaaaacggcattccggtaaaaatataagtcatccccaccgcaagcgtgacggctccccctgttcttccttctaagtccaaaccgatttccccgctcaattcaggcaaatgtacgacattcatgccaagcgtacggaaaacctcaggcgtgctgttaatcgcaaagtaatcagcaggctgtaaagcggtcgctgcaatcagcgccatgatgccgacaagacactcaacaagcattgcgccaaacgcaaccggcttcatatcactccatttattcagcattttcggtgtcgttcctgagccgacaaaggcatggaacccagagatcgccccgcaggcgatggttattgagatgaacggccagacaggtcctgccagcaccggcccgccgccttttacgaattctgtaaacgcaggaaacggaatagacggattgacgacaaacacaccaacaatcaaagcgataaaaacaccgattttcataaagctgcttaaataatcacgcggtgcaagaagcagccaaacgggaagcgcagccgcaaaaaacgcataaacaggaagcgcgattgcaagcgttttcgtatctagcgttaaaaagtcaccgagcgcggtagtctgtacccatggaccaataaagactcctgccattaaaaagagaaagccgaccgttgaagcgagctttaaatttcccgttttcttataaaataagcccacacccatcgcaatcggaatcgtaatccctaccgcaaatgttccccatggattacgttcaagcgcatgcaagacaaccatcgacaggcccgccattgtgatcgtgatgataaacagcatggacagtcctgtacaaaatcctgcaacagggccaagctcatccttcgccacttccgacagcgattttccgtttttgcgcatcgatgcaaacaacaccacaatatcatggacggctcccccaattaccgccccgattaacagccacaataatcccggcaaatagccaaactgcgccgccagaattggtccgaccagcggcccggccgctgcgatcgcggcaaagtggtggccgaacgaaacccatttatttgtaggcacatagtctttcccatcctcaagcgcatgagcaggtgttggcttgtcatcattcactttgagaaccttcaccatcataaatgttccgtataaacgataggcaatagccaaaatacacattgatgctatcacaattgtaaccgcattcattttctcccatcccctttgctgtttttcataaatatatcacaatttcatggtgaaaagcggtcattttttcctatacaaaaagccggcttgaacgggccggctcgtggcagttgaaagacaagccggagatttctctccggctttgctattcttatgactgttttttcaggcggatcacattccaggaaagcggcgtgaaatgagcagttaagccgttttcgctgacagacgatgatccgttggaatgcggaacgacattttttctgttatgctggtttgtcgctttgatatcctgatgctcaagtacgatgtgctctgcgatttggtaagattcaaagcctctgagcgaaatctccgtctccatctgatcctcagccttgtttaccgcaaaaatagtgagggtttcttcctcttcagagtacacaacagcagcatcaacatatggcacatcagtgaaatcagaacaatcgtacttaggagaagaaataagcggtttcagtgactcgccccttccgtaaacagaagcatgcatgtatggatagaaaatcggctgtctccatgcttctccgcctttttccgtcatgatcggcgcgatgacattgacaagctgtgcaagacacgcaattttcacacggtctgcgtgctgcagcatcgtaatgagcagagagccgactaataaggcatcttcaaaattgtaaatatcctctaaaatcggacgcgcagtgatccacggctcgacttttttatcagcctcatttgagtggtaccatacgttccattcatccagagagagattgatagttttcttgctgcgtgtttttgcttttacatagtcacaggtcgcagcgactgatttgataaaatgatccaaatccatggaacgggccaagtagtttggcagattgttatcccggtttccgtagtaggtgtgaagagagatatagtcgacatgctcatacgtatgctccagcaccttcgcttcccaatcgataaaggtcggcatgccgctgtttgagctgccgcaggcaacgagttcaattgatggatcaacccatttcatgacctttgccgtctctgcggctagccgtccgtattcatcagctgttttgtggccgatctgccacggtccatccatttcgtttcctaagcaccatgttttaatgccgtacggctgttcatagccatgcgatcttcttaaatcactccagtaagagcctttcgggtggttgcagtattcaacgagattacgggcggcatctatgcctcttgtgccgaggttgacggccatattgacctcagtgttcacctttttggcccaagataaaaattcatttgttcccacttcattggtttctgtcgtttgccatgccaagtcaagccttctcgggcggttttcgactggtccgacaccgtcctcccagttgtatccggataaaaagtttccgcccggatagcggatgatgggaacctgtaattctttgatcagcgactgaacatcttttctaaacccatcttcatccgcttcagggtgatcaggctcgtatatgccttcatataccgcacgacccatatgttcgataaacgagccataaatccgtttatctacttcaccgattttatattctttgtctacaatcattcgcgcttttttcatcacacgtttcctccttcattaacctttgactccccctaccgtcaggccggagataaagtacttttggaaaaacaagaaaatgataatcaccggcaaaatcgcaaatactgagccggatataagcatgtcgtaattatttccataagggctcagcaagctggacagccctattggaagcgtaaacatttctttcgaccgaagcacaatcagcggccacaagaagttgttccagctgtttaaggactgaaggataatcatcgcaccgaaagccggtttcatcagcggtgccataatcctgaaaaagatgccgaattccgtacagccgtccatccttgcagagtccagcagatctcttggaaggccaagagcatattgcctaaaaaagaaaacggcaacaggtgaaacgataaacggcaatatgacacctgtatatgaatcgatcaagtgcagtccgacggtaagcttaaacagaggaagcatcatcacttccagcggaaccatcatgataatcagcacaagaacaaagatgatatttctgcccttaaaatcataaaccgcaagcccgtacccgatcatcgaagaaaaaaacagggtgagcacggttgtgaaaagcccaagtacaagactgttaaaaaaccatttgaaataaatgcttccgccgttaaacagaaatgtataattatcaagactcattactttaggatcaatgtcgagattgagccccacacgcaaaagctcagatgacggctttaatgatcctaaaagcaaacagaaaatcggaaaaagatacaataggctcagcatcataaaaaacagggttagtgcgattctgtaaacgctgaactgaggactgtgccgcaacatttatccctcccccttaaacgagcctgacagctttaatgaaatcaggctgacaacaaggatcacaatcaaaagcacgatgccgatggctgctccgtaccccatttcgttgtaggcaagcccctgctgatacaaatatccgacaagcgtcagaccaatattacccggggaattattctgccaaaggacgtagctttcctcaaacatcctgaagccgccgatgatgctgatggtcagcacatatacggttacaggcttgagaaacggcagcgtgatgtgcagaaattttttcattgtattcgcgccgtctatatcagcggcttcgtacagctctttcggcacattttgcaaaccggctaaaaagtaaaggatgttgattcccatccatctccatgaagcaagcagcaccatcaaaaacatgccggtatgttcattgttcatccagttctgaggtgaaaagccgagtttgagtaggatggaattggccagagacgtttccatttctccgaagatcagccgaaaaatgatccccgcgacaatggttgaggtcaatgccgggataaataatgctgatttaaatatatttctaaatttgaccagctttgaattcaggaatatggccagaagcaatggaacaggaatcagcacgatcagcgtccaaaaggtgtattccagcgtattccaaagggcggtatagaacgtcgggttgtttagcgctgtataattagacaatccgacaaaggacacctctcccggcaaaattctttggaagctcatgatgaagacactaatgatggggtatagaaaaaatacgagaaaggataaaacgaatggcgctgtaaacagatagggcgccgctttttttgaataaaacagatctcgccagcctgattgtttcgcagctgaaggaacgggatgaaccgttcctgttttcacaggtttcatgagaacctccccgctttcactttttgaatgggattctatttctgtttcagttcacctgccgctctgtccaaggcttgtttaggcgttttttgctgagatttaagtgcgtcgaacaacacgcttctgttgacaaggtctgaagccttggcaaaatcctcatgtaaataaatcggattgatttcatccttgatatcgagcagcacagaaaaaatgcctgttccgttttggaagtaatccgtgtatttgtttttctctttcaattccttggagctccaaacatcccagcgaagcgggtcaaagccgagtacgctccagagttttttatttccttcttcagagcccttcgcaaaggccaaaaactcttttgctaactcaacatgcttggattgcttcggcacaacggttgccgtaccgcccaagcctgccgagcggtcgcccccctctttccatgccgggagcggcctgatggcaatcttccctttcagatcaggcatataatcgataaatcttcccatataccaaatcggcatgaggactgaagcagctcctccttggttcataaagccgtagtattcttcactgtgatgcccgccgcccggcgcaggaatcatcgttttatcattgatcatgtcttttaaatattgaagtgtttttacgttggtgtcattattgaggatcagcttgccgtttttatcaaaatagcctgagttttgctgtgaaatcatagataagaacgttgcggaatcatttgtttccaccgttcccatcggcttcccggtcactttgcgcactttctgtccggctttatggtaatcatcccatgttttaatatcgtcaggattgacgccggcttttttcatcacatccatgttataaaacatgaccgttgttcctacatgcgtatcgagtccgtaaagcttgccgtttttgctgtacagggtcagccgcgcctcaacgaatttatcgcggtccttttcaatcagcggagtcaagtcggcaagcggtatgtcagagcccttcaaaaagtttgaaaaacgggccaattcgacatcggcaatatcagggacgccttctcctgcaattaaggagatagacaagttatcgtgcatttgtccatacggataaacgaccgtattcagcttaattttgcggtcaggatatttttcattccattccttcaccatttctacatagaactgctcatgaagtccgttaaatgtccaaaaggtcagctcggtttcacccgacttcccggatgatctttctgctgaacacccagcaatgactaatgtcaatgtcagcaacatcatgagcacaagaaaacagacagtcatttttttcatctgcgttaccccttccattcgaggtgcgggctattcatatagaccatggttgatcagcgttttgttttcattgatgattcttaatccggtgcagcggtctcttaaggtgtgcgcgtgtctgaaggcattcttgacggaatcctgcccgacaccgatttcgtcaaaatacgcagggcctccggctgatctcagccaatcagccagcacttctccttccgggagagtttgataagccgattggatggcttgccgccggctcggtgaaaattcgttcagcccgtcatccttagcgagctttctgtatgtgtcagttaataaaacagctgcacagcccacctttgccccatgaagaatctgtggccgttttttctccattaattccatctcaatccaatgtgaaatatgatgctcgccgcctgatgccggtcgggaatgatctaatgccagcatgacaagccccgatacaagtaaagactccatcaaaacccgtatgccagtttccgttttcatcgcaatgtcttctgtgtgttcaatgcaggcagcaagcgcctcctgaacaatcttagctcctgctggcgaataaggctcgccggcaagatgccgggatatttcccaatctgctaaagacgttattttaccgagcatgtcaccaaagccagctgccaccattgactgcggtgccgcttttaatagatccagatcagcgaacagtgcagatggggccttcgtttgaatggttgttttcgtgccatataaaataatcggcgcaccggctgatgtaaaaccgtctacagatggagcagtcggataagaaataaacggcaaatctctttgaaacgccgcaaagcggacgatatcatgaatcgtgcccgaaccgactgcgatcatgacatccgttggttgtttcgtatggatcagcacatgaatgagcgatcgttcatcagctgtcacatctccggcttcattttctggaatgatcaggcactcggcctgaaatccttcttgattcagctgattttccagatcaattcctgcaatgcggtgtgtattcgcatcgcagacaaggacaatatgtttattgtttttttgttttacgtaattcaaaagcgaatcagctgcttgtttaccgagaacaatttcttcaacttttataggcaacgtcttttctccggcgtgttcaaaagcacgctgaacgtcagctgcgatacgattcatatcagaatcccctcctcagccaatttggttacatccttaatagaatccagcacataatccggcgtgtacaaacgctgttcgccctgtttcgcagaaccagttagcactaaggcgcttttcatgccataaagcttccccatcgcaatgtcagattcaatgctgtctcctataatcatgcattcatgtgcggacagccccattgctgtacaggcagcctccgccatcagccatgacggttttccgacaacaagttcagtcttcgcttgtgcggaagcctctatcgccccaatcattccagccacatcaatggcatttccgtcttcgttcggaaaagagcggtctttgtttgtagcgataatacgagcgccgccggcagccgcttgaaaggcttgatttaaatcgtcgtacgtgagcgtttcatgaagggagatcacgagccaatccgcttccttcggttcgttcgcgttctgcacaccggccagcctcagctcgtcaaccaagccttgttccccaagcacccatacctttgaaaaacgataatgttttttcagaaaagccgctgtcacgcttgatgacagaacaatgtcgtttacgtccgtttcaatccccgcgccaagaagtttttttctgcacatggcacgggagatattcccccggttgcttaaaaagacgattttctttcccattctcctaagcgttttgatcgcttctcttgctccttcgatcaactcatttcctctgaatacagtaccgtccaagtcaatcagaatgccagccggtgacacaggcgtatcatgactggccataatacgcatttgctccgtgttttcgataaaaatgcttttcatgcaggactgtattgattggggttacatccttgttcagcataatggagtgataggccatttcggcaaccgtttctaatacaactgcgttatgaatggcatttaaggcgtcagtgccccagcagaacggtccgtgattattcacgagcacacccggcacctgttcgtagttatgatgctgaaaggtttccgctatgacttttcctgtattcagttcgtagtcatgaatgatttcttcatcgtacatttcacgagtacatggaatcgcactgtcaaaataatcagcatgggtcgtgcctaacggagggatgtctctgcccgattgtgcccagcttgtcgcccattgagaatgggtatggacaattcccccgatattcggaaaggctttatataaataaacatgggtaggtgtatctgaagaaggcttaagcgagccttcgacgacctctccatcaaggttcaaaacaaccaagtcatcggctgtcaggtcgctgtattcgactccgctaggtttgatgacaattctttctttttcacggtcaatgccgctgacatttccccacgtaaaggttaccagctgatgctcttgaagcttcaggttggcagccagcacttctttttttaatgtttcaagcatgctccatcaccctttatcaattctttttggcggcagatgaaaattgaagatttttgatcgttttcagacgtttcatgacatggttttcttttccgaaataatgaaccagctctttatattcagcgtacaatttttcataaaccgcggcgttttcggcatttggcgtataagttatatctttcagttttcccatgttcgccgctgcctctttgatgtcatcgtagccgcctttttctttgcctgctgcaagcgcgccgaaaatggcagatcctaaggctggtgcttgcggtgaaccagagattttaatgtccatgtttgtcacatccgcataaatctgcatgacaaacgggtttttctcagctattccgccggctgcgtatagttcctcaatcggaacaccgctttctttgaatgtttcgataatcattcgggttccgtaagctgtcgcttcaactaacgctctataaatctcttcaggcttcgtcagcagtgtcatgccaagcagcatccctgttaaatctgcatcaacaagagttgaacggtttccattccaccaatctaaagcaagcaagccgctttcaccaggcgcttgatggtttgctttctcactcagcagctcatgaacgccaatgtttttttcctttgcttcctcttgataagctggcgggacacatgttttcacaaaccagtcaaaatgatcgccgacacaggactgcccggcttcatatcccgcatagcccgggagaattccgttgtccacaacgccgcacattcctggaacgatatgcacctcttcaccaagtagaacatggcacgtcgaggttcccataatcatcagcattttccctggctctgtaatgccgaccgccggtacggaaacatgagcgtccacattggcaaccgcaacagccgttcccgggagaagtccggtcagctttgccattttttcagtcagactgccggctttttctcctactgaatgaatagaacctgacaatttgtcttttgtaatcgttttcattgaaggatttaatttctcaaagaaatcatctgacggataccccgctttttcactccacatcgctttataccctgcggtacaattgcttcgcttgagcgagccgcacagctggtacacgatccagtccgcagcctcgatgatccggtcagccgcttcataaatgtgaggcgcttcctcggcaatttgcatgacctttggaatcatccattctgatgaaatttttcctccgtaccgctgtaaaaaagcctctccttcttcttccgcgatttgattgagccgatcagcatgtttttgggccgcatgatgcttccagagcttcacatagctgtgcggctcctcttcatattcaggcagcatgcataacggctgcccgctgctgtcaataggaaggatcgtacatgccgtgaaatcaattccaatcccgataatgtctttcggttcaacgcccgtctgttcgagtaaagacggaatggttgtttccaagacttcgaggtaatcagcagggtgctgcagcgcccagtcgcgcggcagcttttgacccgtttttggaaggacggtatcaatgacagcatgcctgtattcttttacagcagccgcaagttcctcccctgtttggacatgaacgagcaccgctcttcctgataaagttccaaaatcaacccctattgtgtaagccatgtgacatccccctctacttttgaagccggtaaagcgcctcgttccattttaactcgtgtttcagtttatgaattgtcgtatcacgggaaatgagaacactttcgatccccgccatttccgcccaatcaagcatttgctccgctgtcagttcataagacaggcaggtatgatgtgcaccgccggctaaaatccatgcctccgctgctgttttcaatgacggctccggcttccagagaacacgggcaaccggtaaattcggcatgtctttttcaatttcctggccggtgacttcattcagcacaaggcggaaacgcccgccaatatcaacaatgctagcttgaatggcagaacccctgatgccgttaaatacaaaacgcgcagggtcctctttgccgccaatcgaaagcggatgaacctcgattttcggctgatccaaagcgacagtcggacacacttcaagcatgtgagagcccagaatcatttcatttcccggttcaaaatggtacgtgtaatcttccatgaaggaagttctttttcctttagccatgattttcatcatccgtacaagggccgctgtcttccaatctccttcaccggcaaacccatagcctttctccatcaggcgctgaacggcaagtcccggcagctgtttcattccgtgcagcacttcaaacgatgtcgtaaacgctgtgtatccgccttgctcaagaaaagcggttaagccaagttcaattttcgcctgttctttaatggacgctacctttgcttcgtcacgttttgtttcctcactgatcacatatagtctgtcatactcggcataaagcgtgtcaacctcgtcgtccgtaatgcggtccatcacttcaacgagatccccgatgccatatccgtcaacctgccagccaaattgaatatgcgctcccaccttgtctccgtccgttaccgcgacatgacgcatgttatctccaaatctggcaaccttaatatgtctgctttcatttaatgcagccgccgtatccatccactgggacatttcttttttcacttcttcatcatcccaatagccggcaatgacttttcggctaagccccattctcgagttgatgtaaccgtactctcgatcgccatgcgcggattggttgctgttcataaaatccatgtcaatcgtaccccacgggatatcgcgattatattgggtatgcaaatgcataagcggtttttgataagaggaaaggccttctatccacatttttgcaggggaaaatgtgtgcatccatgtaatgatgccagcacatgtctcactgtactccgcttctcttaacagccctctaatggtttccggtgaagtgacgacgggcttatgagtgattttatatctggaagaaatcccgctgagcccctcacaaatgcttttagcatgctgatctacgagttccagcgtctcttccccgtataggtgctggcttcctgtcacaaaccagaattcataatcctttgtctgaagcatgtaaactgcccctttctcataaaataaaacgctttcaaatacaaaagatacgtactaatgatagaaaataaacctataaataaatatttgtacgaacaattttattatagtaattgactattatactgtcaatcttttctttttaaaaaagccgggggcagagcccggctttttgattcaataggacggccagcccgagctccaattcaaatcattgatgagaagctttggaatgccgttgtcattggcatcataggcatggcgaacaagaatgtttccgttcacaatatcctggcctccaggtcctttccattggtcattgcccgaatccaaaatggtgcctccgccttcaagcatgctttttccgcttttatcaagataagggcctgtaatgtttttggatcttccgtaagcaattttgtacgtactgtttaccccgtcacagcatttatcaaatgaaaccattaaatagtaatagccattttgatacgtaagagtaggagcttctaaggcacccccattattcggtctagctgcaatcgaatagagcgagcctgtaggcttcatcgtactcttatcgagcttagtcagcttaatgccgctccaaaacgagccgaatgcaagccacggattgccatccttgtcgaatgtcagctccgggtcaatggcgttataattatttgagcttgtcgaacgaatcaccaagccctcgtccttccagctccccgaactgatgcttgttgaagatgccaggccaatggcagatgtattgcttccaaaagaagaaacggaataatatagccagtacttgccgttatagtattggatgtccggcgcccactggttttgaccataattcggcacataattggaccaccacgatagcggtgtagtgaaaatggatttttgtacggtccaatttttagcgtctgaagacttcaaaacccgcagtccccgttcttcagtaagccctgttccaagcgcataccatgagctcccctctttaatcatagtcgggtcatgaagcagctcattggatgcaccccaaaacgctgcctctgcgggagcagcagaagtgaatatcaaacctgcagccagagctgcactcgaaaagtgtaagaagcgtttccatgtttttttctttttcaattttgtttaacctcctttatattagaaagcgcttacaaattagattgtttatcctcccttcctgtcaaatcgagctgcgtatcgtatatcgtcatgttcaggaaattttcggtatcccctttattgtagtcactatgctgtaatttgtacagacaaaaaaatagaatccgcctaaataggcggattcttccgtatctttattggtacgtaatttcgtcaaccgtttttcggtctaacttcttaatgacttccgtaattaactttaccgcgttttcataatcatcacgatgcagcatggccgcgtgcgtatgaatgtagcgggttgcaatggtaatggacagcgcaggaacgccattcgccgtcaaatggatggcaccagaatcagttccgccgccggcaatggcatcaaattggtacggaatgccggcttcctccgcagtggctacaactgcatcgcgcaaacctttgtgagagaccatggatgcatcgtaaacgataatctgcgggcctttgcccattttgctctgcgcttctttctcggaaatgccaggcgtgtctcctgctatccctacatcaacaccaaacgcaatatcaggctgaatggtgtgtgcagccgttttcgctcccctcaggccgacttcctcctgcacggttccgacgccatacactatatttggatgatctgtgttttgtaagtttcttaacacatcaattgcaatcgcacagccaatgcggttgtcccacgcctttgcgagtaggaatttttcattgttcatgaccgtaaattcaaaatgcggaacgatcatatctcccgggagtacaccccactccaaggcttcttcccggcttgaagctccaatatcaataaacatgtcttttatttccactgatttttttcttgcttcaggagataaaatatgcggcggcttagagccgataaccccagtgatttctcctttaattgtgacaacggtgacgcgctgggcaagcataacctgagcccaccagccgccaacggtttgaaaacggataaagcctttatctgtgatttgtgtcaccataaagccgacttcatccaaatgtccggcgatcataattttcgggccgttttctgcaccagtttttttggcaattaaactgcccaggcgatctgttgtcacctcatcagcaaatggttctatgtatgatttcatcacttgccttacttctctttcattgcccggtatgccttttgcatctgttaaatctttcagcatggtcaatgtttcatctaattttgccatgttccaaaccctccttcatcagtcctgcattcttattatacaaaacatggcgctaaccatacgactatttcacttgaaaatcgggtatatgtttttacagctttcttttagaaaaagtgaaacctttttctatgcttttcgtattacatcagatcatcaccataagggaggtgccttcacacaatgtttgtcatggttctaaggattattttgcttgcactttttgcttattgtatttatgccgtggtcaaatatgtcgcgaatcctaagagaaggcttaagctggcccaatcaaaagaacatttttatattattgatgaacaaaacaatacccggaagaattttcagctgacgtataaaggcgtgctttttgagggagaaaagcatattccttccaaggaccatccgctgtttattcacacgatctttgtctggacagaatctcctgagaagctgaaacatttctctgcaaaagattttgagaacattgaagaaaaagtgctggaacgatatccaaattgtaagattgactgggaccagcccattaaactcgcaaaaaaagcagaagagcgttaaacgcttttctgctttttataaatcaaacgggctgtagtaaatagcgatgagaatcgcttcaattaccagaagaagcggtactccatacttaaaagaagcgtgtttcgttttatgtctgaaggtttgcatgccaagccagacaccgagcgctccaaatacgatggctatcagccacagccggtcttcagaaattctccacttgtgctgttgcgctttgcgtttgtcaatgcccatcacccaaaaaccgcacagattaatcaacaccaaataagctgcaataatcatgttgcctcatcctttatatagaaaaagccgctctgctggagagcggctctatatgattacttgtttaattgagctttagcagcatcagcaagctgattgaatgcagtaagatcgtttacagcaagatcagcaagcattttacggtttacttcgataccagaaagcttaagaccgtgcattaaacggctgtaagaaaggccgttcatgcgagcagctgcgttgatacgagtgatccaaagtttacggaaatcacgttttttctgacgacggtcacggaaagcatagtttccagatttcatgacctgctggttagctactttgtataatgtatgttttgaaccgaaataaccttttgctaatttaagaacctttttacgacgcttacgtgtaacagttccgccttttactcttggcattgaatttccctcctaattgttccttatccgattacttgatgttagcaagcatttgtttgatacgtttgaagtctcctgcgcttacaacagcactcttgcgaagcttacgcttttgcttttgagatttgttggcgaataagtgacttgtgtacgcgtgagaacgttttaacttcccagaacctgtctttttaaaacgtttagcagatccgcggtgagttttcatttttggcatgggatttcctccttattgcttttcgtttttcggtgcgagcattaagaacatgctgcggccgtccatttttggttttgtttcgactgtcgcaacctcagcacatgcttcggagaaacggtctaatacacgctgaccgatttctttatgagtgattgcgcgtcctttaaagcggatagaagctttcactttatcgcctttttcaaggaatttaatcgcattgcgcaatttcgtgttaaagtcatgctcatcgattgtcggacttaaccgaacttcttttaagttaatgattttttgattcttgcgtgcttctttttcctttttctgctgctcaaatcggaacttaccgtagtccatgattcggcagacaggcggttttgcattcgctgcaactaacacaaggtcaagatttgcgcggccggcgatttcaagtgcttcctgacgggacttgattccaagctggtcgccattttgtccgattaaacggacctcacgtgcacggataccctcattaaccaattgatctttgctaataatgagccacctccatagtttcttcgaattgattcacaactcattttgtatgcattttgcaggcaaacaaaaagtgtgggcattataaaacacccacactacgaacatctgtatcaataaaaatgtacggtcaacctgccaactacatgcatgtgtcaatcaggtgagaagcgggtgcttctgcttgtgatttatattcaattcaataactattctacacaataccggatctttagtcaaggacgacttatccggaacaacttttacattgtaacatgggttttctatgagcgcaagagagaaaaagaaaatctttcatcccccccagaatgcaaagaaccaacaattccccccttatttcgcaatttacaacaaaaccaccgacaggaagaaatgtaaaacaaagttaatctctgaccgatataagaagcagaagggagcctgacacatgaacaaactgatacagcttgctttatttttcacattgatattaaccggatgctcaaatagcagcacatcttccgaatcaaaagtcgaaactgttaagacaactgcagcatttcctcaaaaggggctggagaaagagctaaaaaaactaaaacccgtttcattggacatgaagttcgagagtccacttgctactgagttaggaaagcggaaggcaaaagaagaagctgaaaagcaaagacaaatcgccgccgagaaaaagcttgaaaaagagcgggaggcgaaacgaaagaaacagcacgaggaaaaagcggagagacagcgattagcagagcagcaggcggcagagaatcagcgattagcggaagcaaaaagacaagctgaacttgaaagacagcggcaggcagcaatccaaaaagagcagaaagcgaacgctgagaaaaagcggcaatcgcaggcacaacggcagcagactgaggcacccccatctaatagtcaagatccaccatcttcctcgagtcagacagataaaaccattcaacagccagcttcagagcttcctgatgacgatggttatggttatgaagaacgaaaaaagtggcatgacgatcaagtagaatggggcattaaacaagggtatatcgatcccgaagacgcaccataaaataaaaaaagccaaggcattcagccttggcttatccaccgatcagctgcacgaacacagggatgaccagaaccgttaccactcctactacgacaacagcaatacttgccatcgcagcttcaacttctcccatctcaatcccgaccgctacaccaagtgcatgtccggatgttccaagagccaatcctttagaaatcggatttttcactttaaacaccttcaagaacaatgctccgagcgcatatacgatgacagcgttaaagatgaccgcaaaggctgtgatgtcgctgatgcccccgatgccttttgataaaggaagcgcaattgccgttgtagccgcctgcggaagcatgcttttcattacggccgaatcgagatgaatgcctttagcgagcaaataaacaatcgtgacagagcagatagagccggcaataatggaggccatgatttgccaccagtactttttaagcttatctctttgtttgtacaaaggaattgcaaatgcgatcgttgccggttcaaggaaaaacttaatgatctctcccccgttattataatccgcgtaggaaaaaccgccgatttttaaaaatgcgatccccagcaccatggcaacaaacaaaggagtgaaaaggaagaagcctttcgttttcttaaataaaaaggtgccgatgccgaatgcagcaagtgatacgacaatcccaaaataaggactcattgtgctttccatgtgaagaacctcctgtttcccttaatggtgaacgagttcgttattgttctgcgggctttgcactgtttttgttttcatgtccgctgcggttttgcgttttccgctcagcgacagaatcagctgagaaaacaatcccgtagcccccagcaaaataatcgttgcgagcagaatgacaagaacaatttgcaggccgtattgctgcatcacaccgagcgaattcataacagatatacctgacggaacaaataaaaatccgatcagagaggtcaaagacgttccgagcgtctccacttgttccagtttaatgactttcaaacataataggagaaataataagaccaaccctacaaccgatgccgggataggtattgggacaatagcggcaatcatatttgaaaccagcataatgacggcaaaaataaatgcttgtgttaaaaacccgtacacttttttagcactcattttcttcacctctttctctttggtacccccattataaataagaattccctgttataaagcgcttacaagataacatgccgaatagcgggtctgagttgcagaatcaaatggctgaaatgcaaaaagccgcccatcaaatatggagcagctttttcaattccttcgcatatgtccggctgaccggtattttcgatccgtctttcatgatcaaattatacgttgaattaaaccatggctgaatttctttaatatattcggtattcacgacaaagctccgatggacgcggataaaatcagaatccggcagctttttctcaatcacaacgagtgtatcgctgaccgtataagaatgatcgaaggtttttacattgacatgaccatcttctgttccggcatagataatgtccttcgtatccacaatcacaatcgattcccccacagatagcgcgagcttgtgctggccggcatggctgttttgctctgtttctacaatatcccgattgacttttttatattttttcagcgtttgctgaattctttcttcatcgaatggcttggttaaataatcaagagcatccacctcaaacgctttgagtgcatactggtcatacgctgtcgcaaacacaacagcaggaggatgcttcattttcttcaatcgctttgcgatatcaaaaccgttttctccagataaatcaacgtctaaaaacagcaaatcaggtttttgatccatcatttggtcaaaagcggattcgatattttccgcttcattgatttccatttcctcattggtccgcttaagcaagtaagccagttcatctcttgccagcatctcatcatcaactattaacaccctgagcatgttcttctccctctttcatctgttgcattggcacttgaaaggaaacctctgtccctttatgaacctcactgctgatatgcagtgcagcctgctgtccgaataaaccgatcagccgctgatttaggttataaagcgctgtaccggttccctccttagacggaaacggtttctttcccagttccggcaagacgtccggcggaattccgcgtccgttatccgccaccttcatatagacggatgcattatcagataagacacagactgtaaccttgcatatgtcttgttttttcggaaacgcgtgccgaagcgcgttctcgacaagcacctgcaaaacaaacggagggatttcaatctgctccagtctgctgtcgatattaagctcaattttatatttcccgggaaaacgcgcctgttctaatgacaaataggcgttaagatggtttagctcctttgagagcggaatcagcagctgtctcgctccttgaaggtttgaacgaaaataaacactgagctgcaataggagcttacgggttttttcaacatctgtacggcatagcgcagaaatcgtgttgatcgcattaaataaaaaatgcggattcacctgtgcttgaagcgctttaatttcagcatccttgagaagtttgctttgcagctctgcttccccaagctcaagctgtgtcgaaaacagcatggccagcccctcggcaagttcctcctctacctgactcaggcctgccgggcttttaaagtacatttttaaggtgccgattgtattgccgttcgatgtcagcggcagaacaattgcagcgtgcaaagggcattcagcatgcgtgcattcaatctcttcctgcgaaatcgccttcataatatgccctgttttaatcacctttttggacagcccggtgatcaaacttttcgatgggatgtggtgatccattcccgcaccgacatgcgcaaggatcttttctttgtcagtgagagacaccgcatctgttcctgtcagcttatggataatagccgctacacttttacaggagttctcatttaatccttggcgaaaaaatggaagtgtctgatcagcaatcgtcagcactcgatgcgtttcgagagcccttgcctgttcttccttgcgaatgatcgcttgaataatagacagaaaaataaaactgcctgttccattgatgagtatcatcggaattccgatcatgctgacaagctcccaagcgtcactgaacggctttgccatcagcaaaataatgatcatttgcagtgactccatgccgattcccacaagagcggcgatgcgcggtgtcggcattcgatatcgcttcgtaaaatacctgccgatcaagcctgcaagaacacccgctaaaatagatgagacggcacagcttaaggccgtgctgccaccgagtgaaaaacgatgcaggcccgcaagtatgccgatcccagcccctacaaaaggacctccgagaaggcccccgatttccacgcccaaaatacgggtattcgcgatagagcccgatggatctatcgtaaacacccagtcattgtttacaatcatatttctttgaatttcgatgcctgtataattgctgatgatgctgaaaagagaaaaaatagaaattaaaatcgcttttcctttatagccgtcctgattctgaagagcttgtctgaaaagtttcgtatgggcgagaatgaaccctaatataacaataatccccactctctccagcatcataatcattaaatgaatcattcatgtcacctgttctttccgttttcattctagcatgttttcgttttacggctgactgtttttttaaaatcgtctgaaaacatatttcacaaggcttttatctattgtaaaataaaacatgagccttttggcagaaagatttgaatctgaagcagaggagaagatcatgaaagccgtattttttgatttagatgatacactactttgggacgaaaaaagcgtcagaacaacatttgcagaaacttgcttacaggcggagaaaaaatatggccttgcccctgaggaattcgaagcagctgttcgcgaagcggcgagagaattgtacatgtcatatgagacgtatccatatacagtgatgatcggcattaacccgtttgaaggactgtggtccaatttctcagagccaatcagtgaaggctttcaaaagctgaacaagattgtgccggagtacagaagaaatgcatggacaaacggactgaaagcgcttgggatcgatgatcctgcatatggcgaatacttgggagagttttttgcggcagagcgcagaaagcgcccgtttgtatatgatgaaacttttgctgtactcgatcaattaaaaggcaagtatgaattattgcttttgacaaatggcgatccgagtctgcaaaaggagaagcttgccggcgtacctgagctcgctccttacttcaatgaaatcgtcatctcgggcgcattcggcaagggcaagccggatgtttcaatttttgaacactgccttaagctgatgaatattgaaaaagacgatgccatcatggtcggcgataatttgaatactgatattttaggcgcttcaagagccggaatcaaaaccgtttggatcaaccggacggataagaaaaacgaaactgacgtaacgcctgattacatcatcagcagccttcatgatttgtttcctatattagagaaataaaaaagcatgatctcttcaacgagatcatgctttttattttattttttcgcttcagctactgcctttttcacaaactcatcaagtgaaatggtttcagagttctgctctccatacttacggacgtttaccgctccgttttctgcttcttggtcaccgaccaccagcatgtacgggattttttgcatttgcgcttcacggattttgtagccgattttttcatcgcggctgtcgacttcaacacgcaggccttcacgctgcaggcgttcctgcacttttttcgcgtagtctaaatgcacagccggagaaaccgggatgacttggaactgaaccggtgcaagccatgtcggcagcgcgcctttgtgttcttcgattaagaaggcaacaaagcgttccattgttgaaacgacacctctgtgaatgacaaccggacggtgctgcttgccgtcctcaccgatgtatgtcaggtcgaaacgttccggcaataagaaatcaagctgtaccgtagacagtgtttcttcttttccgatcgcagttttcacctgaacatcaagtttagggccgtagaatgccgcttcaccttctgcttcgtaatagtcgtggccgatttcgtccattgcctctttcagcatggattgcgctttgttccacatttcatcgtcatcaaaatatttctctgtatcttccggatcgcggtaagacagacggaatgtgtaatcacttaaaccgaagtcttcatatacatcctggattaaacggactgtacggataaactcatccttaatttgatccgggcgcacaaagatgtgtgcatcatttaacgtcatcccgcgtacgcgttgaagccctgacagcgcacctgacatttcatagcgatgcatcgttccaagctccgcaatacgaatcggaagctcgcggtaactgtgaatgtcttgtttgtaaatcatcatatggtgtggacagttcatcggacgcaatacaagtgtttcattgtccatttccatcggagggaacatgccttcctgataatggtcccaatgccctgatgtttcatacagctctttgctgccaagcacaggtgtgtatacgtgctcatagccgaggctgatttctttatcgacaatgtaacgctcgatgacgcggcggattgtcgcgccttttggcagccaaagcggcaggccttgtccgactttttgagagttcgcgaacagctttaattctttgccgagctttctgtggtcgcgttctttcgcttcttctagcatacgaagatgctcttcaagatcagcttttttgaagaaagctgtaccatatacgcgctgaagcatttggtttttgctgtcgccgcgccagtatgcgcctgcaaggcttaacagcttaaattctttgatttttccggttgaaggaacgtggacgccgcggcacaggtcaaagaattcgccttgctcatagatcgaaacggtttctccttcaggaatcgcatccaatagttcaagcttcaggtcgtcgccgatttccgcaaaacgggctttcgcttcttcacggctgacttcttttcgaacgatcggaaggttcgcattaacgatttttttcatttctttctcgattttcggcagatcctccggtgtaatcgcttcgtccatttctacatcgtagtaaaacccgttttcgataaccggaccgacgccgaatttaacatccttgtagatgcgtttaatcgcttgagccagcaagtgagccgtactgtggcgcataatttgaagaccttcttctgagccttctgtaatgatttccactgtaccgtcttcattgatcggcgttctcaaatcgatttcttttccgttcagttttccggctaatgattttttctttaatcccggactgatggatgccgcgatatcttctgttgttgttcctttcgcaaactccttgactgctccatcaggaaatgtgatttttaccatatctgacatctttgtcactcctttttttgcatataaaaaccccgccccctatgaaagggacgaggttgaataaacggaatcgtggttccacccttttttccgcaaagccaatacggcacctgcggctctaagctctgtaacgggagttcccgtcagccattactgttccttttcaagaggttcacagctgaagttcaaaggcggtaaagcgaatggtccttagctgggaagcttgcagccagggcttccctctctttgagctggtatcattccttcgtgtccttatcaatacgtgtgtctttcttaatctcctatgtattataaattgttcaatccaaaaaatcaacacgatcgcgtttccttttttaaaccgacagccttaaatagacaggctgccggccctcatccttccgagtgcttcaccggtatttctgcatctgtaaaagcatgcagcgggagcatttccactctctcttgaaatacgttttgaatggtccttgccatcatgtgctcgggctggtcggtataaagcacgacttcatcaggcgcaatggaaatcagcggcgcgagcaaatgagaatcaatatacataggatgatcccggacaaatcttctgtctatgtatttcattttttcccgttccggcacatagcgcagctcccataatgtaaaggaaccatcatggacaatatgcacttttttgattcgcggctgtttggcgtccacatagtctctgagtgtttgaataaagttttgatattcctgttccatcttatattcatcaatcgctgcttctgtaatatctctcagctgcttatagtatgatccaagtcggaaggtctgaaaggagcgaatgtaaaatactccttcctctaaacagatcgtttggagttcatccaaaattgattgtttccgtgaaagcttcagcggctcaaacggaagatcgtctgcttcaccttcaataatactgtgtgcgagctgaaggatttgctgctgttcatcctggtccgtgaaacaataagtttcctcaatcaatgacagcatatgctcgtcttctttgcattccaaaaaaaatttgaccagaatcggctccataaaacgctgaataggaaaagccggattcgctttttcaatcccgatttttcgtatgccttcacggacaatgatattgttccgatcgtccgaatgctgaatgagatgtaaaaaagcggctgcatcatggtcatcttcaaagattatttcaagcatgtttgtccccccttacggcatctgttacaagtatatgggggatgtttttaaaatagacgtaaaggtcattggcaaatcttaatttgattcttggaacaagttttgcattttctttctgaagatgaacggcaatgagataaacacgatatacaaagcgagcaccataaagaaagcgggcagattgccagccaaaaagctcgcacccagcacattaagcgcaatcgtcccagggatgattcccacagccgttgcggcaaaatacggcagcgctttgacattggaaaggcctgccgcatagctgacgaaatcaaaattgatcggcaggattctcaaaagaaagatatagaaaaatccgttatcctccatttgcttctgtatggcttcaagcctttcgtaatgcccgttctttttcgccgaaaacaaaccagccgcaaaaaacgaaacagctgaagcgcacatcgaaccgaataacgtataaagcgtgccgagaagcgggccaaacgcaagtccgccagctattgaaataacagacaccggaaataaaacaagtggcctgacgatggatatcccgataaacatcagaggtgcaaagactccgaacgacaatacccataccctgatttctttcggcgatacattcaaatacgttttatttccccaatagagtaaaccagcacctgcaagcactgccagccatttgacagccgtttttcgtttcataccctcagttccttcccctttgaaccacagcaattatggatgtcggcggttttctccgtcaaggcggatcggagcagccaaatataatatccgctccattaatcttgcagcttttacttcttctttttctcccctctgcgaatacgtaaaatgatgcttcagctcgtcaggtgagaaattagaagaaaagaacgttggcagctgctgggacattctgtgctgaagcaccgttccgatgacctcatcccttacccagcttgtcattgattctgctccgatgtcatcaagcattaatacgggtgtggtctttaccatattgagcttctcttccaatgtctggtcttgcagcgaattcttaagctctctcacaaattcaggcacataaacaatcatggaggaatactctttttccgccagctcattggcaattgcagcgagcataaacgtttttcctaccccaaatttcccgtataaatataatcctttcccttttcccgtctcattatagcttttcaggaagtctgtaacatgctgaaacatcgcgagtctgcttgggtcactgatatcaacttgctggaacgtcgctccaagaagatcctgctggatatacatgcttttcataagagactgttgtttcttctgctggtcgagcttccgtttgactggacattcgtaatactcgatatcaatagacctcccattgacaacaagcttcggatggtagccctccaacaaattgttgcagttttcatcttccgaacaataggagcaattcttgctttgttcgatatattcataaagcttatttaagctcttttcgatcattttttggtcaatcacttcttcgttttccttcaaaaatgcttgaacatcttgatctttcatgactttttccttcatttgttcaagacgtttttggaaatccggcctgccggttacgccctgcagggaacggccgattggttccatctattccttcaccccgcatctctgtctttaataggcagagtattttttcagtttttgcatttcttccatcatctttttcttctgttcttccaaatcctgcggatgcagcttctgctgtccggattctgaatcggacgctgtttccttttctgtcatccaatcaggaagcttttcttcacgaatcactttttggtttcgtttcgaagactttgtttttccctcagcccattcaagatactggcggttttcttctattgcgagcttcatcgcttccctgaccgttttcacctttttgcgtgcccaatgcgaagcgattttttggatatagtttttcgacagcttcatgtcggttttcagcatgacataataaattaacacatttgtgacgcctggctcgagcttctgttcgaacataatttcttctatgatcttcagatcagcttttgacggctctgttccgtcagcaatgtcctgcagaagcttcttcggggaaatcgcctccagcaatgcaatcagcttcccatccagagaatcctcttctgccggtttttcgccttcacgcagatgcaccggctgtgttttttccaccaaatcgggcagctgtccgtttctttcaatttgataccagtcgctcgccgcttttcttaatgcctccgtcgtaatgacgtcacgctcatcaattgcgctcatcacaacattttgcatttgcaaagggtcaattccgtacagataagaaagctttttgattgtgtcccgcacctgctgggtcatcgcttttctcggtatcatcgtctcagaaagtcccgctaaaaacaaatcaaaatcaaacacatcctccgttatggtgtaggacggagactgtccgacagaagtatactcggacccctcggcaagccttaccgtttcctccatatcggatgtgagcttccattcactcggctgcagcgattcaaacgcatgattaaacggacgcgtaatgtccttcgcatcttctgaaatggccgggtgcgtaaaaaattgttttaattgctgatatttcgtttttccgaccctattatacagaaaaacattcagcattccgtcttcaaaaaattcatttggtctgagcggcggaaggagttcatatataaagaggcgctcctgccgctcggattctttcatatatactttcagcaatccgatgccctcgagcttcccctgttcctgatggatcgtttttaagttggactgtgtcatcgccatcagctgtctatgtgtggactctccgccccacagacggttttgttcaagctctccccacaatgtcatataaagagagaatgcaacagggccgattaagggctggtacagttgtgtaataatttgtctgtcaatatcctgcagcatcgatctgcttttaaccacatacgggtctacaggcagtacatctttccaatagtcagccatacattctcaaaccttccgaatttgtttctacctttcattttacaccgtttcttatatctatcaaatgccaattttgcacatgagaaaagagctagaagaatcctcttagctcttttaacgctctttctttattaagtcttttaattcatcgataaagacgtttatatctttaaactgccgatagacggacgcgaaccgcacatatgcgacttcgtcaatcttagccagccggtccatgaccatttctccgacgagctcactcttcacctcggagcagccttgattgcgaagttctttttcaatatcaaagcacatgtcttcaagcgttttgagtgaaacaggccttttttcacatgcttttatgaggccgcgcagcattttttctctgctgaattcctcacgcacaccttcttttttcacaacgatgagcggggtttcctccactttctcaaaggtcgtaaaccggtagtggcaggattcgcactcgcgtcttcggcgaatcgactttccgtcatccacaggccgtgaatcaaggactcgtgttccgttatgctggcatgaaggacatttcaataaaatcagctcccaactatatcgttccctgcaatgtattttcggcagcctccgccttttaaaaatagatgtgacagcatctgtcgggagagccgttgttaaatttgtttctatagcattaggtggtttgtgaaaatctccttcttattttacaaaaaaaatgaaaaaagaaaaagctgacactctcgtttctttataaaaataaaaggagcataagctaaaaagcgcataatggctttctagcttcagctccctttgtgttcgcaatttactttatagtactttcgcttgcgcctgtttaatttgcacaggccccattcctcttggtatttcaatgttttctcttgtatcagcatgtaatgcctctgcaatgtaatcagcagcgacattaggatctaagtctccacaagtataaacatcaatgctcgcatatccgtgctcaggaaaactgtgaatcgttaagtgtgattcagaaataatcacaactccgcttacgccttgcggtgcaaatttgtgaaatgcaacctcgcgcacctcagcacctgattttagagcagcatttacaaacgttttttcaataaaatccatgtcattcagcttatcaaaatcgcatccccatagctcggagataacgtgacgccccattgtttccatagtcatggacccccttaacaagaattaaaaagtgaaattccaacaactgggtcggccatttaccacgggggaaagttagtccggagaggtcctaaccctttaagtaattccgaaacagtctcaagcaagaagttcacgaaaaatagtatactgtgtttaagtctaatttgcaaggtgcgttttttcagaaatatgctgttaagggttttttctttaaaatgtgtccatgaccttattttatacagcagacggatgtttcattcgtgccgctacatggcggattagatcaacaactctgcaggagtagccccattcgttgtcataccacgccagcacctttactttcctgtcttccattaccattgttgtaagcccgtcaatgaccgctgaatgcggattcgtattataatcagtcgaaacgagcggttcatctgagtaatcaagtacaccgtacatcgacgttttggcagcgcgtttaaatgcctcgtttacttcttcagccgtaacatccgttttcagatcaacaacgagatcaaccaatgagacgttcggaacagggacacgcaaggcgaggccgtgaagttttcctttcagatgcggcagcacaagcgaaagcgcctttgccgctcctgttgttgttggaatgatggattcaccgcaagcccgcgcccggcgcaaatctttgtgcgggttatcaatatttttttggtcattcgtatacgcatgaactgtagtcatcagaccgctctcaatgccaaactcttcatccagtacttttacaacaggcgcaaggcaatttgtcgtgcatgacgcatttgaaataatgacatggcgctcagcgtcgaattggtcctcatttacgcccatcacaatggtaacgtcttcattttttcccggagcggtcaaaatcactttttttgcacctgcttctatatggcccatcgctttatctttagcattaaacttccctgttgcttcgacgactatgtcaatatcatattcccgccaaggcagctgttttggatcacggctgtttaacaaaagcactttctttccatttacgatcaggctgtcttcaccagccacaacctctttgtcgtatctgccgtgaattgtgtcatactttattaaatgagccagcgtttctgcggaatagctggcgttaatggccactacttgaatttgatcgtctaacatcgcttttctaaaaaccattcttccgattcttccaaacccgttgatcgctacttttaccttcatgttggacaccccttatcaattatgccatcctaatttgttactatctaaaattagtataacacattaaaacaaattcgccagtacatattgataaaaatcaacgattataacgctaatttatgatgcatcttatgttttcttgcacagaatatcaggcgtaagaaccaaaaagcagccagcgctccgcactgactgccctcatgctttatgattcctgttttaacttatcattgagcacactttcttctagcacagaaaatgtatccccgtatactctgttaatatgattcgctccccaagcacacagcatatctaaaattccttctaagctgcggccgtattcgctgagctcatattccactttgggaggaacttgattatatacgattcggttaatgacaccgtccgcttccagctcgcgcagctgctgagtcagcattttttgcgtgatattgggcattaggcgttttaattcgcttgtacgtttttttccgtgcgtcagatggcataaaatgacgcatttccatttccctccaatcacttcaagagtcgcttcaacagaaatgttatattttttcttctccatacaatccattctcctcacaggcaccaaaaagtgactatagcacttcaaagtacgtacttttatttcttaacgatatgtttcataatcacatttgccggctgatttgaatctgctcttttttatttatatagcttactcggcagaatttcaatcatacaacacatcttacaaaggaggaacatcatgacttcagccaaaagcagtattcctgcactactggctttggccgtaagtgcattcgcaatagggacaactgaatttatcagtgtcggccttttgccgctcattgctgatgacctgcatattccagtcacgacagcaggattaaccgtttccctttatgcgctcggcgttacatttggggcacctatattaacttcattgacctcaagcatgtcgcgtaagacactattgctttggatcatgtttatttttattgccggtaatacgatggcagcaaccgcttcaagcatcgggattttactagcagcacgtgtgatatcggcattttcgcacggtgtgtttatgtcgatcggttcgacaatcgcagcggatattgtcccggaagataaaagggctagcgcgatttcaattatgtttactggcctcactgtggcaactgtaaccggagttccttttgggacatttatcggccagcagttcggctggcgtttcgcctttatggtcattatcgccgtcggaatcattgctttcattacaaatggtattcttgtaccgtccaaattacgaaaagggacgaaaacaacgatgcgggatcaattgaagcttgtgacaaacagccggttattgcttttatttgtcattacagcgcttggatacggaggaacattcgttgtgttcacgtatctgtctcccctgcttcaggaagtaacaggcttcaaagccgggactgttgcagtgattctgctcggatacggaatagctattgctatcggcaatatgattggcggaaagctgtcaaaccgaaatccgattgccgctttattctatatgtttatcgtacaagcaattgttctattcgtactgacatttacagccccgtatcaaacagcagggctcattaccattctctgtatgggattgctggcctttatgaacgtgcccggccttcaggtgtatgtcgtcatgctggctgagcgttttgtcccgagtgcagttgacgtcgcatccgcgatgaatatcgctgcctttaatgcaggaatcgcgcttgggtcataccttggcggtgtgatcaccgattcaatcggattgattcataccgcttggataggcggattaatggtggtcggtgcagtcattttaacaggctggagccgcttaatggaaaaacgagatcggcaggaagcctgacaattttaaaggaggaaatgaacatgacaacacatttacaagcaaaagcaacacttcataatggggtagaaatgccttggttcggcctcggcgtgttccaagtggaagaaggatctgaactggtaaacgcagttaaaactgccattgttcacgggtaccgcagtattgatactgcagctatctatggaaatgaagctggcgttggagaagggattcgggaaggcattgaagaagcaggcatttcaagagaggatctgtttatcacatcgaaagtatggaatgcggatttaggctacgaagaaacactcgccgcgtttgaaacaagcctatccaaactcggtctggattatttggatctatacctcatccactggcctgtagaaggaaagtataaagaagcttggagagcgcttgaaacgctgtataaagaaggccgtatcaaagcgattggcgtaagcaacttccaaattcaccatcttgaagatctgatgacggcagctgaaattaagcctatgattaaccaagtggaatttcacccgcgcctcacacaaaaagagttgataagatactgccaaaatcagggcatccagatggaggcttggtcacctttaatgcaggggcagctgctggatcaccctgtattggctgacatcgctcaaacatacaataaatctgtcgcacaaattattttgcgctgggatctgcagcatggcatcattacgattcctaaatcaacgaaggaacaccgcattaaagaaaatgcaagcgtatttgactttgaattaacgcaggatgacatgaaccgaatcgatgcactgaatgaaaacttgcgagtcggtcctgatccggacaactttgatttttaatggcaaaaaaacaccgttcaatatgaacggtgttttttgtattatgcccagctgttcatgatttcatcaagctgccttttggtctcttcaagcgtgccgctgttatcaatgacttgatctgctcttgctgttttttcctctaagggcatttgagagcggatacggctgactgcttcttcttccgtcagctgattgcgcttcatcagacgttccagttgaagctcttttgtcacactgaccacaataattttatcaaccaatgattccaatttgctttcgaacaatagcgggatatccaatacaacaaatgcctcccgatttgcaacggcttcatcacggcgattgagcatttcctgcctgactgcgggatgaacaattgcatttaaagcgagacgcttttgttcatttgtaaataccagcgctccaagcttttttctatctatatcgccatttgagagcagtatgtcttcaccgaattcgtcaatgatttgccggtaggccggcatccctttttctaccgcttgttttgcaatgatatctgcatctataactgttattcctttttcaatcagcatattggctaccgtgcttttgccgctagctattcctcccgttaaaccaatgactaaggtcaagagatccactcctttttacaatttccagagcccaatcgtgattaacagaagccccggcaaaaacgccattttatcgatccatttccacttagacagaaaatggccggcattggttccaattgatacaaacagcgagctcatgattgccacggcgatgctcatcacaatcggtgaaaaaccgagaatggctgcgcctatgcctgctccaaaggcatcaattgataaggcaaatcccaataagaccgcctcaattccattgatcacacccgatttgtcgatatccgcactcatgggttttctcaaaatatgaatcacaatccctaatgaccgaacctctaaattaagcagcgttttttcatgcaataggtattctttatcttttgccggtttgaagaattggtacagaacccacgcaccgattccaaccaatatcaaaccgccaagcttctccgtcacatatacaggaaaaaacttcgtgagaaagcttccgatcagcatggatataaacatgacagcaccggaacagcaggcgataaccaaaatcgctttaaacggtattttcatttttctcaatccgtacgtaaatccgactgaaaaactgtccaagctgacagccaacgccagcagcagtatagaaaccatttgcatatccgtttcttcctttctgttggtgctcttgtatcagatgtgaaatgcccgggattcatcacaatcatatatatgggaaagtgaaaaatccgtgtttcgaaaatggcatcctccattacagagttactgatatatgcaccgacagcttggacgatgaagcattatgctacttttttttctggcactttgcgcaaaaatgcgtgcctcttcctccaacgacaattttcgaaatcatcgttccgcaatttttgcatggctcgtctttttttccgtacacaaaatgctgcagctggaacattccgatttccccttgggagttgatatatgaacggactgtgcttccgcccgcatcaatcgcctcctgcagagtgtttttgatttcagcgtgaagggttttgattgttttatctgataattgatttgcttttatctcgggatgaacacccgctctgaaaagagcctcatccacataaatgtttcctagtccaactaccgttttttgatccagtagggcagttttgacagcgcggtttgttttcgcaagccgttcttttaaatacgcactcgtaaattcttctgcatccggctccggacctaactgagaaagcgggagctcgcccgcttcttctcccggtttaaataagtgcatggttccaaatttccgcacatccctgtaccggagctgggttccatccgtcatcgtgaatatgacatgcacgtgtttatcgtcaggctcctcggcttgatgaagaccgtattttccttccattcgaaggtgagaaaccataacataatgatctaaatgaaacagtaaaaactttccccgtcttccgatggactgtatcgtttctcctgctagttttcgcgcaaattcctccggttcggcaggccgtttgatgatattcggccatctgatctctaccgatttgattgtttttccctttacaagcccggtcagagtgcgccggaccgtctcaacttctggtaattccggcacatccatcacttcctatctctgtttatttcgcatcgtaccaagatgggcctgatgcaaagtccacctttaacggcacatctaatgcaagcgcatgctccatcacttcaggaacaagcttttcaagaatttcaatttcttcctttggcgcctcaaaaatcaattcatcgtgtacttgaagcagaagccttgctttcaactgtttttctttcagcttggcagccatgtcaatcatggcttttttgataatatcagcggcgcttccttgaatcggcgtattcatggccgtccgctctgcaaaacttcggatattaaagttccggctcgtcagctcagggatgtagcggcggcgatgcataagcgttgttacgtatcctttttgcttcgcttcctgtactgaatcttccatgtacgcttttacgccttggaagctttccagatagcggtcgataaatgctcccgcttccttccgggtaatgccgaggttctgtgacagaccgtaatcgctgatcccgtaaacaatgccaaagttgaccgctttcgcctggcgtctcatcgcagatgtcacttcatccttagcgacatggaacacatccattgccgttttcgtgtgaatatccatatcatttgtaaaagcttcgatcagattatcatcctttgaaatatgggcaagcacccgcagctcgatttgtgaataatcggctgcaaaaatgagccagtctttttcagacggcacaaaagcttggcgaattttccgcccttcctcaagcctgatcggaatgttttgcaggttcggatcagtcgagctgagacgaccagtttgcgttaaggcctggttaaatcgcgtgtgcactttatgcgaatccggtctcgtcacctttaaaagcccttcgatatatgttgattgaagcttgccaatttgtctgtactgtaaaatatagtcgacaatatcatgcttgtcagccagcttttcaagcacatcggcagacgtagaatagcctgttttcgttttctttacgacaggaaggccgatcttttcaaataagatgacgcctagctgtttcggagaattgatgttaaacggctctcccgcaatctcatggattttttcttcatattccttcagcttcgcacccagttcttcacccatccgttttaaacggtcaacatcgactttgacgccagttgattccatttcgccgagaataagcgcaagaggcatttccagctcttcaaacagttcaagctggtcgttgttttccagctcctgaacgagcttttcccgaaggctttgaatcgctaacgctttgcggccaaggtgctcagacagtacgtcttctgacggcactgctcgttttgctccttttccataaactgattcatcacttgaaacgatatgcaagccgtaatccttagccacactcgcaacgtcgtcatatgaattgcccgggttgatgatataagccgcaaggagcgtatcaaactcggctcctttcagctcaatgccctgccagcgcaaagcgacaacagcccgcttgctgtcgaagacccatttcttctgctcgtcattttccacccattctttaaacacctcagactcaacggcagtgtctttcggaatgaaataagctcccttttcatttacgatcgaaaatccgagaatcggctcttcatgataattatcgccaatctgttcaacgacaaatgcggatggagaaaccaatatatcgcttgtcacgtctgtgactgttttgacattaatgtcttccaacgattgatcctgttctgcttctgcactgtcttctccaagccgttcaagaagcgtgttgaagccaagatctttaaagatggcaatgacctgttcacgattaaagccttgatattccaggccggaaacagatacctcaatcggagcatccgtcataattgtcgcaagctccttgctcatcaatgcttgatccttaaactcctcaagcttttccttcaatttctttccgctcacctcgtcaatggactccagcagcttttcaacggaatcaaattgttttaaaagcttaatcgcagtcttttctccgacgccgggcacacccggaatattatctgaggaatcgcccatcagacccttcatgtcaatgatttgttcaggcgtaagcccgtatttctctttgacatgctccggtgtgtaaaattcaacatcggtaattccctttctcgtaatggcaactgtcgttttgtccgttgccagctgtgttaaatccttatctcctgagaaaaccttaacttcaaatccgtctttttcagccgatttggccagtgtgccgataatatcatccgcttcatattgttccagttcatagcggctgatctggtaggcatccagcagctcgcggataaacggcatttgttcggaaagctcaggcggggttttctgtctgccgcctttatattctttaaatgtgccgtgacgaaatgttgttttcccggcatcaaacgcaaccagcatgtgcgtcggtttttcatcctcaagcattttcatcaaaatcatcgcaaagccgtatacggcatttgtatgaacacctttatcattgcttaacagcggcaatgcaaaaaacgcccggtaagccagactgtttccgtctacaagcactaatttttttcgttccgtcattcaatttcctcctaagaagcctcaggcttccattcatctcttacatagtcattagctcctcttattttaacaaagttcaatttgaaaggaaaatacgtgaactataagagaagacacaaaaaaggacgggaacacaaataggttcccgccgtcaaaattggctccttggatgaaggggttctactacatcctaccagcataggtttaacagtgcatgaagatattgttaaacctttgtaaacattaggcggacttttcagcggcccgtttcagcgtcacggtaaagacagttccccgtccaggctcgcttgtgacatcaattttcccttcatgagcctctattaaatgcttgacaatcgcaaggcccagtccggttccgcccgaattcctgcttctgtctttatctacgcggtaaaagcgttcaaagatgcgcggaatttcttctttctgaattccgattccagaatcagcaacctcaatctgaatgtctttttctctgggctttacattgatagccacggagcccccctcaggcgtgtaggttaacgcattgtttacgagattaagaaatacctgtttcagcctgtacgggtcaccagatacatattgagggtctttcggggcattcagttgcaaggagatgcctttctcatccgccttatgcttcagaagcgtttcaatctcaccaagcattttggccggctcaaacgtttcgatactgagcgtgaaattttgctgctcgatttttgagagatcgagcaaatcctgaaccaaagactgaagcctttcgctttccttaagaataatagagagaaattcagaaagcgcctctttgtcttccatcgccccatccaataacgtctccgtaaacccttttatggacgtaatcggtgttttcagctcatgagaaacattggccacaaaatccttcctcatctgctctaatttctttgtttccgtcatgtcatggaaaacgagcacaattcctttccattcatcgtccggccccataatcggaacgccgtccacttcaaaataacgccgttctattttgatcggaagtcttaacagcttgcatttctttgtctccgtcataaaaatgtcttcgacaagctggatcacttcttcatgttcaaatgcatcgtgataaagacggcgcagcatatgattcggattgatatgaaactgcttggcgtaagatctgtttacgagattaataaagcctcttccgtcgatcataatcagcccggagccaatgttttcaatgactgtcagcagccgatcccgctgcatttcctgcgttcgcgtcatttccatcagatcaatggcaaggctgttcatcgcatgtcctagcttatcagaacgcctaatatagccgccgtacgtccgtgcatcgtagttgcccttagagagttctgtggctacatttgtcgctgactcaattgaccttttataacgtgaggtcatgctggaataaaaataaacaatgacgataaatgcggtacaaagactggccgtcagcatcccccacaattcgccttttaagccgtcgcttttttcagaggcggaaagcagcacatatcctgttttttccccttcgcttctaagtgaaagtccgtaataaagcttgttatctgttgttgacagaataccctcatggccagaaacaagcgcctgcaccttttgggaatcagccgctctcccgttagacccatacagcaccttgccgtctgtatcgataacggatgcgctcacatcaagcgcgccgcctgcatctttaatgattttctcatttgtttgattattcagattgccggcatcaagaagcgaagccaagtattttgcttctttttcaatgtgttcctctgctttcctttgatcagatgtttcaaaaagctgctgtaaaaacagcccgagaacacaaaacaccagaatcatacagacaacgaatacagaaaaaaggcgcacacggtatttattcattcatttttggctcctccagtttataccccaatcccctaatcgttttaatgtagatcggttttttggtattgttttcaattttgtcgcgaagatggctgatgtgcacatcaacaattctcgtatctccggcaaaatcataattccagactgcgctcagcagcagatctcttgtcagaactctgcctttatgtctgcctaaatagagcagcagttcgaattctttcggtgttagttcaagctgactttctttaaagtacgcttcataatgatcaggcaggattttcagatcgccgattacgatctggccttccatttcatcgttcttcatctcactagagggcgcagctatttccgaacgccttaaaatcgctttgactctcgcatttacttctcttggactgaacggcttggtcatataatcatcagcaccgagctcaagccctaatactttgtcgaattcctcatccttcgctgtcagcattaaaatgggaaacatcagtttttgctgtctcagctgcttgcatacttcgattccgtccaattttggaagcatcacatcaagcacaatcaaatcaggcttctctgtttccgcttttttgagtgcttcttccccatccgaggcggtaatgacatcatagcctgaccgttccaaattgtactgtaaaagagtaacaatagattcttcatcatccacaactaaaattttcttgttcatgctgtgcctccagtattataattccccgacatcctatttctctattttatgtcatcttaacatgtttcatgattttattttagcgaaagcaggacattccgacaattcgccttttacatcatttttaaaagaaataaagacgtttatgataacgctttcatttatagtaaaaagagaaaggctgtattaagcaagcctttctctctttttattaggataatactttcatgacatttttgacagattcaactgatttattcagctgcgctctttcatagtctgtcagttcaagttcaatgatttgctcaagaccgttgccgcctacaattgtaggaacaccaaggtagatgccttcatagccgtattccccttcaagataagcaattgtaggaaggacgcggcgctgatccttcaagatcgcttcgaccatttctgtcagagaagccgcaggcgcataatacgcgcttccgtttccaagaagattcacgatttcgcctccgccttttctagtgcgctccacaattgcgtcaatccgttctttcggaataagagtttcaagcgggataccgccagcataagaataacgcacaagcggcaccatatcgtcaccgtgtccgccgagtacgaaaccagtcacatctttcactgacaggtttaattcctctgccacaaatgttctgaatcttgccgtatcaagcacaccggactggccgattacacgctctttagggaagcctgattctttgtacaccgcgtatgtcattgcatcaacaggatttgtcagcaccacaataatagagtcaggagaatatttcacgatttcccgcgtaacgcttctcataatcttttcgtttgtagagaccagatcatctctgctcataccaggttttcttgcgataccggctgtaatgacaacaatgtcagagccggctgtatcctcgtaattggatgttcccgtaatttttgcgtcaaagccttgaaccgggcttgcttcaagcatatcaagcgcttttccctttgtcgggttctccaattgcggaatgtcaacaagaacaacgtctgccagctctttttgagcgattaaaaatgcagttgtagctccggtaaaacctgctccgataacagaaacttttttacgagtatttcccatgtctctcttctcctttatggctagttttaggctttttccttgcttagtccatgtttttgatcagttcttctccgaactctgaacatttcacttcagtcgcgccatccattaatctagcaaaatcgtaagttacgactttggaagcgattgttttttccatagatttgataaccaaatcagccgcttcgttccatcctaaatgctcaagaagcagaacgcctgaaagaataactgaagatgggtttactttatcaaggcctgcatatttaggagccgttccgtgcgtcgcctcgaaaatcgcatgtcctgtttcgtagttgatgttcgctccaggagcaatgccgattccgccgacttgcgcagcaagagcatcagaaatgtaatctccgttcaagttcattgtcgcaacgacatcaaactcgtttggacgcgttaagatctgctgaaggaaaatgtcagcaatgctgtctttgataatgatttttcctgctgcttccgcttcgctttgcgctttgttggcagcgtcttttccttcttcttcagcaatgcggtcatattgagcccatgtgaagactttatctccgtattctttttcagcaagttcatagccccagtttttgaaggcgccttctgtgaacttcatgatgtttcctttgtgaacaagtgttacagatttgcggccatgctcgatcgcataatcaatggcagctctgaccaagcggcttgttccttcttctgaaacaggcttaatgccgatacctgatgtctcagggaaacggattttattgacgtttaactcattttgaaggaagctgataagcttttgcacttcttcagagccttttgcatactcgatgcctgcgtaaatatcttctgtattttcacggaagatgaccatatcagtatcttcagggcgttttaccggtgacggcactccagtaaagtatcttacaggtcttaagcagacgaataggtcaagctcttgtctgagcgctacgttcaaagaacggataccgccgccgacaggtgtcgttaacgggcctttaatcgcgatgaaatattcgcggatcacatctaatgtttcagcagggagccactcacctgttttattataagccttttctccggcgtaaacttctttccatgtaattttcttttcgcctttgtatgctttttctactgctgcttccaaaaccttcgaagccgcgttccaaatatcaggaccggttccgtctccttcgataaatgggataatcgggttgtttggtacgtttaatactccgttagagactgtaattttttcaccttgtgccacaataaaaacctcccagtatgtaattcatatttagaaaacattttatttttcttatatagaaaataaaatgatttttcctaacattcaatttaaagtgtaacccaattttgatgttctgaacaagaggctaacctcattgacgcaagccagcctccaatggttctttaggctctttcttcaatcggaacgaatttttgtttgtcagggcctgtgtaatctgcccgcgggcggatcagacggttgttgtcatactgctcaagaatatgagcgagccagccggacattctgcttacagcaaaaatcggtgtaaacaaatcatggtcaataccgaggctgtgatatacagaagccgaatagaaatcaacgttaggcggaagctttttctctgatgtgacgatgtcttctatacgaatcgacatctcataccatttgctttcgcctgtcaggttggtcaggcgcttgctcatttctttcagatgcttcgcgcgcggatcaccatgcttatacacacggtggccgaatcccatgattttttctttcttttcaagtttagcgcggatgtacggctcagcgttttccacttcaccgatttctgtcagcattttcataacgccttcattcgctccgccgtgaagaggccctttcagcgcgccgattgctgcagtaatgcctgaatagatgtcagaaagtgttgcgacgcagaccctcgctgtgaacgttgacgcgttcagctcatggtcagcatgtaaaatcaatgctttgttgaaggcttcaacttcaattggtgaaggctcttcaccgtttaatgtgtaaagaaaattctccgcaataccgtaatcttctctcggttcaacaggctcaagacccttgcgaattctggaaaacgctgcaaccaggccaggcacctttgcctgaaggcggatcgcctttctgtagttggcttccgggttcatggtatcagcctcgctgtcaagcaggcctagtaatgaaattgctgtccgaagagcagccatgggatgaacattttcgagggaataagatttgaagtgctcaataatttcttgcggaacggcagcttcctttgcaagctgctgctttaactcttcaagctcttttttgtttggcagccttagatgccaaagcaagtagatgatttcttcaaaacttgcattctctgtcaaatcatcgatatcataccccacatatgtaagggtatcatcaataatagaactaacagatgatgttgttgctacaaccccttcaagaccgcgtgtcgctgtcatatataacatctccttttcaataaatttcccctttaagagtgttgtaaaaacatgaggcttacttaaaaagcacgatgcaagtatttctctcccccaaaaagaaaatgcttacattttactggctgctggaactaaaaccctttgcttatgaaagaacataacaaattcttataagcttatttaagtttaagcctattctcattataaacaataatcagacatttgttaaatgtttacctataattttttttttcattctgtgatttccccgaaaaaacgcctttatttgcgggtttttgcataaaaaaaaagcggctttaaggccgcttttttttatgaagtgaacagttttacgatctgcatggctaaataagcaatccccgctccgatcagcggccccaccgcaactcctccaaaaagcgcgactgcaagaatggtcccgatcacgagagcagttgtaatatgcggatcattttcaagcagggccaggccgttttttgcaatcagcgccactgcgatccccgctccaagggcgatccatgcgtaggaagaccgcattgcttctccaagctgcttaaatccgatttctcccgtggcaatcgggacaagaacggcgatggtaataatggtcacaccccagttaatgccttttgactggatggtcggaaataatttctgatcaagcccaacgattttgatgatcaaaaggacggatacagcaaagagcaatgattggttttttgcgataagtgcgatagccaagagtaaaattaaaaataaattcgcttgtgtaaacacatgccatccctcctttaagatgaatgtattcatattcagccgcagcgtgaatacatataaaaaataggacatgctgacgagaggaggaccgttttcgtgaatcaatcttatatcactatttttttcagaaccctctttgtcatatcaatgaccgcagggtcgatagctgcggcctattattcgtttccgttaacttatccgttcctgatcgcccttattctttcttcagtgattcatcctgttgtcgattatttggacaaagtgacaggattcccccgaacgataaatgttctgggcgttcttgctttttttctgctcgcagccttcggcgtcctcaccattctggtagccgaaatcgtaacgggaacagcctatctagcaaaaacgctgcctccgcatatcagcacgtttatttcatattgcgaaaaattgtttaccactcatattcagccgctctataacgagttaactcttttgtttcaagaattggaaacgaaccagcaggcttccatcgtcactcatatccagacactcggtgattctgccgctaaaaatgccgggctcctgctgtcccacattctagagatgatcccgagatttttcgctcttcttcccaatacggcggcggttctgattttttctcttctggcaaccttttttatgacaaaggattggcataagctgaaagccatgcttgttttaattctgccggatcgtgtgacagctaacagcaaagcaatcagcagcgaattaaaaaaagcaatgactggttttatcaaagcacaagccgtcctcgttttcatcacgatggtgattgtatttatcggcctttctctcttaaaggttgaacacgccgcaacaattgcttttttaatcgggcttgtagatcttctcccttacttaggtgccggctccgtatttgtgccctggattttgtatttatcgattacgggccagctgccccaagcaatcggaattggtatcctgtacctcgtcgttcttattcagcggcagctgacagagcccaagatactaagtaaatctatcgggatcgatccgctggcaacactcatcgccctgtttgccggctttaaattattcgggtttttaggactgattgcgggaccggctgtactcgtcatcatccaagctttcatcacaacaggcgcattaaaagaaatatggtcctatatcaccgttcagcaaaaataaaacggcagccgttttttcatggctgccgttttttatttgatgatgatccgcttattcttcgacattcctctcagccatttgaacagaatcggcttacaccagccgcgggtaaacgggataagaagacaggcgccggccaaatctgataaaaagcccggaagcatcagcaatagaccgccaatgaaaatgcacagaccgtcagcaatcgcttctcccggcattttgccatattgaagatcacgctgaaccttataatacacttcggttccttgtttttttgcagctgctgcgccgataatgccagtcagaatcatgaatagaactgtcggcaaaataccaatcagctttcctaaaaataggaatataccgatttctattgccggaaacacaataaaaagcaaaaacaaaaatctcatatccaagccccccacacgtgtaacacgttctgttcaacaaaaggcatgataaagagaaaaggaagggattccccttccattttcacctgtaattaaagaacgctcgcacggccttgatagactgcgcctctggaagcgtcaactgtaatatcctggccatctgtcaaaatagatgtcgcattttccagacccacgataaccgggatgccaaggcttaatccgactaccgcagcatggctagtcaaaccgccttcttctgtaataagagcagacgctttttcaagggatgcaatcatatcacggtcagtgcttttggtaacaagtaccgcaccgtcagtcattttttgctcagcttcttttgcattttgtgcaacgacaaccggaccgtaagctgatttgcgtccaatgccttggcctttagcgatgatatcgccgacagtatgaaccttcattaagttcgtagtgccggactcaccgacagtgccagctgtaataacgataagatcgccgtgttttacaattccgctgttcaatgatttttggacagcatcctcaagcatctcatctgttgagctcgcattttggccgctttccgcgaatacgccagatacgagggcaagctttctggaaatagagtcatttacagtaaccgcaacaatcggagcctgcggacggtattttgcaatcatacgtgctgtatggccgctttctgtcggcgttacgatcgcagcagcattcaggttaatcgcagtatgtgcgacagattgtccaattgcgtctgtaattgtcatgcccacttggtctctgcgttttgagagaatttctttataatttaatgcttcttcagaacgggacgcgatgttatgcattgtttgaactgcttcaaccgggtaacttccggcagcagtttcaccagaaagcatgatcgcatctgttccgtcgaagatcgcgtttgcaacgtcacttgcttccgcacgagtcggacgcgggttgcgctgcatgctgtcaagcatttgtgtcgctgtaataacaggtttgcccagcgcgttgcattttttgatcagttctttttgcacaagcggcacttcttcagctggaatttccacacctaagtctccgcgcgcaaccattaagccgtcagacacttcgagaatcgcatcgatgttgtcaacgccctcttggttttcgattttagggatgatttgaatatcctgagcgttgtgctcttcaagaagctcacggatttcgagcacatccgtagaacgtcgaatgaaagatggtgcgatgaagtctactccttgctcaataccgaaaacgatgtctcgcgcatccttttcagtaatacccggaagattgacacttacgcccggtacgttaacaccttttttatttttgagtgttccgttgtttaatacttttgttttgatttcgcgtttagcggcatctacatcaagtacctcaagaccgataaggccgtcatctaacagaatcgttgaaccttgttcaacgtcatggactaaaccttcatatgtcactgaaattttatctgttgttcctacaacctcgtccattgaaataatgagctctttgcctgtttcaagctcaataccgccgttttccattgtatgtgtgcggatttcaggaccttttgtatcaagcagaattccaacgttcttgccaagttttttacttgcttcgcggatatttttaattcttgcaccgtgctcctcaaaatctccgtgagaaaagtttaatcgagccacgttcattcctgactccattaatttcgtaagcatttcaatactttcacttgccggaccgatggtacaaacaattttagtttttctcatttggttcacttccttctgaaatcttcagccttcatctgcacattagatagacagttcttttgaaagctgatacatgttttgctcaactgtgtgttttgtctcaagtatttctataatatcatggtctacaagcttattgttttgtatacctacacagcgtccgccttttccttcaagcagcagttcaactgcatatgcgccgagacggcttgccaacacacggtcagcagcactcggagaacctccgcgctggatatggcccaatacagataccctagtttcaagatttgtttcttcttcaatgcgtttcccgaattcaacaccgctgcctacaccttcggcaacaataataatactgtgcttcttgccgcgttcgtggccgcgttttaagcgggcaatgatttcgtgcatgtcatagtctgcctcagggattaagatcgattccgcgccccctgcaagaccggcccacaatgcgatatcgccggcatgacggcccattacttcgattacatatgtacgttcatgagaagtcgctgtatcgcgaatcttatcaattgcgtcaattactgtatttaaagctgtatcgaaaccgattgtaaaatcagtgcccggaatgtcattatcaattgtacccggtacacctacacatggaaacccgtgttccgttaattttttcgcacccatataggaaccgtctccgccgataacaacaaggccttcaataccaagcttcttcaagtttgctatccctttttcacggccttcaactgttttgaattcaggacatctcgccgtataaagcttagtccctccacgatgtataatatcgcctactgatccgagttcaagcttttcaatctttccgctgatcaatcccgcgtatccgttgtaaataccgtaaacttcaacgtcatgatagatcgcttttctgactactgcgcgaactgctgcgttcattcccggggaatccccgccgctcgttaatacccctatacgtttcattctccattcacctcagcaacatatatgattaaacataacatgatcattgccctaaaaacaatgaaaagggatctccatcctccctatgaaaccttacctattatacaattaaataaattgtttttaaataaaatttaaggaatgtcacaaaaaataaacgtgagccaaaggcttcacgtttatttagtttaccccgatatattgatcttcaaccgagactttgccaattgctttatatttttcatagcgctgctgaactaattcttcttcgctcagcttcagcaaagtttttaacgattgtttaagggtttcgtccatatagcttgcctgcagcttcacatcatggtgcgctccgccttttacttctttaatcatatgatctataatacctaattcttttaaatccggcgcagtgattttcattgtttctgctgcttttttagcaagactggagtccttccataaaagtgccgcggcaccttccggagaaataacagaataagtagagttttccagcatatgcaaatgattgcctacacccagaccaagggctccgccgcttccgccttcaccgatgacgatacagataacaggcactcgaaggccggccatctcaaacaggtttttggcaatagcttcactttgtcctctttcttcagctgctcgtccagggtatgcccccttcgtatcaataaaacagataattggtctgttaaatttgtcagcctgtttcatcagacgaagcgcttttctgtagccttcaggatgcggcatcccaaaattgcggactaggttttccttcgtgtctttgccgcgctgatgcccgattaccgttacagggaggccgtggaacttcgcaatcccgccgacaatggcttcatcgtccccgtacgctctgtctccgtgacattcaaaaaagtcggtaaacaggtgttcgatataatcaagagttgtcggacggtccgccagacgcgcgatttgaacccggtcccatggcttcagatttttgtaaatatcatcctgaagcttagcgagacggtcttcgagccgttcgatttccgcacttagatccatatcggaatcttgggtgaatttttttagttcggcgattttggtttgcagttcaatcaccggtttttcaaattctaatcttggagccactcaatgtcacctcctgtttgatgcatatccagcagattttctaacgtttttttcatatcgtcacgatgaataaccgcatcaagctgtccatgttttaataaaaattcagccgtttggaagtcctcaggcagtttttctcctattgtctgttcaataatccgtcttccggcaaaaccgatcagcgcgccaggctcagcgaaattgtaatcgccaagggatgcaaagcttgctgatacgcccccggtagtcggatgcgtcattactgaaataataagaccctgttcttcactgaacagttttaacgcagagcttgtcttagccatctgcatcaaacttaatacgccttcctgcattctagcgccgcctgaagccgtaaaaataataaacggaactttatcagcttttgctttttcaatcgcaagcgtgattttttcaccgacgactgaacccatgctgcccattctgaatgaagagtccatgacggcgactacagccgggtgtccgccgatggtgcccttgcctgtcacaacagcctcgtttaaggatgttttctcgcgatctttttcaagcttttccagatatcccgggaaaccaagcggattttccgagagcattccctgattgaattcctcaaaggatttttcatccatcaagctttcgatacgctgttttgcgttcattgggaaatgataatcgcagttcatgcatacccgcatatttttatccaactctttagtgagcatgatttttttacacttaggacattttgtcataatgccttccggaacatcgtgcttcgcttgatcagatggtacggaagcatactttttctttttcgtgaatatatcctttaacaaatgattacctcccttttgtgaagggttctcttcaccgcatgtcatcaaacagatagacttgctaataactttaccgaaactattgtactttttttgtcaaacgctgtcatcctcaattcgacaactttttattcgatgacgtgctcggaaaggcttgtatgaaatcagataaggtgttgaaacgacaaggttgacagcgcattcaaaaataatgttaaacccggctgaaatttttttaaggctaaccccctaaaaaaatttcagccgtcagtttaacttgagaacagcgcgccggtctccgccaacgcgctgccatttttggaatgaattaaaattattcaccaataatcgtaagttttcttgttttttctgcgacttcctcagggtcaacagtgattcttgcaacacctgtttccatcgcagcttttgccacagccttcgcaacagcaggcgcaacacgtttatcaaacggtgcagggatgacataatctgcgctaagctcatcttctgaaaccagtgaagcaatggcttcaaccgctgcgattttcatttcctcgttaatatgagtggcacgcacatcaagtgctccgcggaaaataccagggaatgcaagaacattgtttacttggttcgggaagtcagaacggccagttccgataacgcttgctccggcttcacgcgcatcttccggcatgatttccggatttggatttgccattgcaaagataatcggatcttttgccatgctttgaaccatttcttttgttaacgcgcctgctacagagacaccgataaatacgtcagcatcaacgatgacatctttcagagaaccgtctttgcgatcttggttcgtgaacttcgccacttcatttttgacatcgttcatgccgttcgggcgcccttcataaatggcccctttggaatcgcacatcacaatgtcgcgaacgccataatgatgaagaagcttgataatcgcaatgccagccgcacccgcgccgtttgcgacaactttaatggatgacatggattttccagacagtttcagcgcgttcacaagacctgctacggttacaatggcagtaccgtgctgatcatcatggaaaaccgggatgtttgtttcttttttgaggcgctcttcaatgataaagcagtttggcgctgcaatatcttcaaggttgacgccgccaaatgtcggttccagcaattttacagtttcaacgattttatcaacatcgtttgtgtttaaagcaatcgggaacgcatctacgcccgcaaagcttttgaaaagaactgctttcccttccataacaggaagcgccgcttcagggccgatgtttccaaggccaagcacagctgtaccgtcagttacaactgctaccatgttccccttcattgtataatcatatactttgttaatgtcttcatgaatatccttacacggttctgcaacacccggagaatacgcgaggcttaaatctttcgcatttctgacctctacttttgatttagactccagtttcccctggttgactttatgcaggtgtaatgcttcttctcttaatgacattctcctaaacactccttatggatattttttgattcgtatactgctgcgttgattgctgcattctgcggagtaaatctatctgaatatttaaacaggatcacataattgctccaattgtataacaaaaagcgaatcgttaccactgttttaaaacgacgtttttttgacccaacagctcttttaagcgatataacacctggtgatctgcattgatatggaacgactcaggtagcttaatcgtctgtttttgcctttcataatagagataaacgcctgtttcccctttatgctccagcaaaatgcgcttaatctttgccaggatctcctggctgtgctgactgctttctatttttatataaaccgatggcgctttttctgcatccatatcttctaataattctgcccgggacatgatgaattggatcttatcttgtctaacttcacatttccccgcagtgaacaaaagagcgccttctcttaaaacgggagaaagctgtctgaattgttcagggaagactacggcttctatctcgccggtttcatcactgagcgttaaaaacgccatgttttgacctgttttcgtccgaatcgttttgatcttcgacagcagaacgcctagtgaaagctgccttttgactgcccgctgagcctgcagaatagagactgctccttgcgcagtgagctgttttcggaaggcggagaggggatgatttgaaaaataaatgccaagcgtttccttttcaaacgcaagtaaatccaccagaggaagctcctccgtctccacatacttcggcttaattgaaaacgattcatctaaaaacaatcccatttggtcatcgtccgcggcgaatagctcagcatgttccaaagcaacatcaatggatgcgagcagcgtggcccggttttggccgaattcgtccatcgcaccagaaaagataagtgcttcaagcattttgcgatttacgctttttgacggcacgcgaaagcagaaatcgaaaagatcttcaaatggtttctcttttcttgctttatatatatctttgactgctgagacgcctacactttttatcgcgcggaggctgtatctgacagatccgttttcaactgtaaacggaaaactgcttttattcactgacggaggaaggatacgaatcccgctcccctttgcttcgtaaagatattgagagattttatcctcattgccaatgacgcttgtcagcaatccgcacataaaatataacggataatgagctttcaaatacgcaagctggcacccgatcatgctgtatgccaccgcatggcttctgttaaagccatagtttgcgaatttgacgattaaatcgtagacctcatttgcagtgtctacagaatactccttttttaagcacccttcaacaaaatggcttcgctctctgtccaggatttcttttttctttttgctgaccgcccttctcaataggtccgcttcgcctaaagaaaaccccgccatacgggaagcaatcatcataatttgttcctgatacacaatgacgccatatgtatcttccaaaatgctccttaaatcttcatgaggatagtgaacaggcgcccggccgtgtttacggtcgataaataacggaatattttccatcggacccggccggtacagtgcattgaccgccacaatatcttctaggcccgaaggtttcagccgtttcaagacgcttctcatccctgcagattcaagctggaaaatgcctgtcgtatccccttttgacagcaaggagaacgttttgtcatcgctgtaggaaatacttgaaaggtctattttaatattttcttctttttcaatcattgaagtgatggattcaataagtgtcagattcctcaaacctaagaaatccatttttaaaaggcccaagtcttcaagatggtccatcgcgtattgcgttaaatagatcccttcatgcccttcttgaagcggaacaacatctgttaacggttcttcactcaggacaacgcccgctgcgtgggttgatgcatgccttggcagcccttctattttccgggcaattgaatagacttgctgaagcaggcttgactcccgaagccgcttatccagctgcggtgactgctgtctcgcttcatccagcgtcattcccggtcttgaaggaatgagttttgcaagctgatctgcctccttcgggctgacgccgaatactctgccgacgtcccggagcgccgcctttgccgcaagtgttccaaaggtgataatctgtgcgacgtgcattgcaccgtatttctgctgaacatattgaatgacttcatcccttctagtatcgggaaagtcaatatcaatatccggcatgctgacgcgttcgggatttaaaaatctttcaaacagaaggtgatgcttaatcgggtcaacatctgtgatatacagcacgtatgccacaagagaacccgccgcagaaccccttcccggtcctgtaacaatccctttttcatgggcgtgcttcataaaatcccacacgatcagaaagtaatcgctgaacttcatccgcttgatgacatcaagctcatattgaagacggcgaaggtatcgttcatcaggcttgccgaaacggctgcggagtccctccatacagatatccgttaaataatcatcagcggacgttccgtctggggtcggaaaagacggtagacgggtctgcccgagactgacgtcaatgcggcattgttccgcgatctctacagaagcttgcagtgcctcgggatgctctcgataaatgttttgcatttcttcgtgtggtttcaaatcgagatcaggcaaatcttcagcgggtgcatccgtcagtttttcccccgctttaatcgctttcaaacaacggtaggcagccttatcttccttccttatgtaatgcacatcgcctgtggccgtaacagggatacccgtttcttctgacagctttagaatctgctcagacaagacttgattccctttaaaaggctgataggagaaataaaaagctccctttccgaatatagactgaaattccagcgaggcttgagcagcctgttcgaacagtcctccttcaagaagcgtttcaatatatcctttttcgccgggcgttattgcgataatcccttctcgataactgtgaagccatttcggcttcagtccgccttttgatttagattgcagaacgctgctgattttcagcaggttttgatagcctgtatttgattttgccagcaggacgagcgggtatgcttcaagttcgctgtcatctgtaaaaacagaagccgtcaaaccgattattgggttgatccctctcgtcttgcaagctttgtaaaattgaatagctccgtacatgacatgatcatctgtcagcgccaaagacgcatatccgagcctgtcagcttcactgacgagctcttccacagccgcggcgctgtttagcaggctatacccgctatgcacttgcaggtgaacaaaagacatgctatcacctctttctcattacgattcatttcttccctcattataaggccggtttccaaaagaaacaaatgttcttttttgactcatcatcatacttgtcctgaaagctcaatatgatataaaaggtgaggtgataaagatggatcaggaagcaggatttatggtgaattttatcaatagctacttcattgcgttaggggtgctgatcgggggcgcactcattggagggctcggagcatatttggcaggcgaacccccgcttacagccattacaaagcttgccaaccggttaaaaatatgggcgcttgtcgcagctatcggaggcacctttgatgcggtatacagctttgaacgcggcatactcgaaggcaatacgagagatatctttaaacagcttcttttaattatttcggccatggggggcgcgcaaagcggctggcttattatatcatggctgacccaggagcatctttcttcatgagggtcccccagcattacaaaaaaccgggatggcagcgttttttcgcgggaatgatgtgcggagccgtaatcagctggttctttttcctgtttacttacggaacattccaagaggagcaggtcagcctcatcgaaaagcaaaaagagcatgtaaaagacttgaacaatcaaatttcgatctatcaggaagacctccataaactgaatgaagataataaaagaaaactgctgattcaaagcgtcagcgtcaaattgctgaatggggataaatataaaatatcacagccggataaaacgaaattcgaggagcatgtaaaggatgatatttcagaggtgattacaaaagacatagagagcgtctatcaaacaaaggatctcttgaagcggacaattgaaaataaagtctatatgatcaatgaaaaaaaatacgaggcaaccgtcagagaattgattatttatacgaggctgacagtggaacttgaaatatctttcgccacataattatggatttttttcaaattctccaaacttctgtcgctttttcccattcttttttataaactatatgtgaggcttaatggcgaaaggaaggaggaagggaaatggaggtttacagtgaccgtcagttagcaaaagatcaagcagcccgtctcagacaaggtttttctgcatatgccgaaacaaactcactcgcttccctcatcaaaaaagaacttcaatcacacaatctccaagtctacgaggaccttactgatttcggctgctggttcatccccgtcacagatgaacactaagagagagggtctcccctctactcgtgttctttacataatgtttccagatcagctaaaatccgatcagcttcatcccagctgtaaatagaggcgcctgaagctaacggatgccctccgccgttatatttccgggcaagtccgttaatgacaggccccttcgaacggaatctgactctgatttgatcgtcttcttctacgaaaaacacccaggcgcgaatacctgagatattgccaagcgtcccgacaagctgtgacgcttcagaagccgttgtgccgaatttttcaagcgtatcctttttgatgaaaacagaagcggccccgttttcggacaaagacacattttgaaagataaagccgttaagcttcaccacattcagttttgtttcatacaattgattaaacaactctgaggaagagaatggatactgaatgagctcgcctgcatattttaatgttttttccgtggtattcggaaataaaaagcgtccggtatctccaacaatgccggcgtagatcagctctgccgctttcgtattcagcttccagccgtgctcttttccttctaaatacagctcgtaaatcatttcacttactgagctggcgcttgtatcgacccagagaaggtcaccgtatggatcttcgttcggatggtggtcgattttcattagtttggcgcctgaaggataacgctgatcgtctattctttcctgatttgccgtatcgcagacaatgacaagtgcgccttcatatgtttcattgtccacctcatcaagggaatataagaaagagagggacggttcaggcgtgccgaccgcaaaaatatttttttcaggatatgtttcacgcaggatttccgtaagcccgcactgtgatccgtaggcatccggatcaggacgcacatgtctatgtaagataatcgtgtcatataatgatatggttctgatcaattctgttttcatttgatactcctttattgtttttattcattaaatcacattctctgccgacggaaaagaaaaataacgtcaaaaccaagcccgtttttgtataaaatgggtttgtaaacttttacgatggaggatttcatttatgctggttcttgtttttttgattgggctttccgcctgcttttatgtgtactataaagtaaaaggcgtacgggcaaagccatctttggcaaaagaaatatgttcagcaaaatcaagcatggccttagggtcactagtcctgttctacgggctcaaccaaatgatattattccattcagtattaacgttaataatcggcggtatctttatcgtcataggagcaggaagcgcttgggcaggttataaagcctttaggcattacaatccccttcacgccaaagaagctgaaagagatcacgcgtaaggggcgcctgaacgtcccttagcttctttccatcagctgaaccatcagcatcgctttagacacgatatgaccttggctgtgcacttccacttccattttcccgaactttctgccagcctccaagatgcgaggtttgacttcgatgactgattccatctgcacaggcttcaaaaagaagatggtgatgctctctatgacgagttcgccgcgttttttcgagcgcaaaaatcggtttgccgcttgcgtcaaaatggtcgtaaatacgccataagaaatggttccaagctgatttgtcatttgcggcgtgacttcatactcgtaaaccgtttgatcttctttatcatcaccctcatctttaaacccccttgaaacgatatcatcaagcttctccccgacctgcggctgcttttgaatcatttgaagagctttcaatacgtcttggcggctgatcatgccgatgagtttttggtggccgtcagtgacgggaagcacttcgatcccttcccataccatcatttgcgcagctgaagcgacagatgttttcccaataaccgtgacgggatttttggtcataactttttctatagatgcatttcggtcatggccagcaatatcttttgatgtcagaatgccatggattttcatttgatcgtcgacaaccgggaagcggccgtgccccgtttcaaaatttttctcataccatttttcaagtttatccttaggcgaaagatataccgtgcggtcagcaggtgttaggatgtcctccaccaaaacaatttcttttttgatcagctggtcatatattgcccggttaatcatcgcggcaactgtaaaggtgtcatagctcgtggataaaatcggcagttcaagctcatctgccagctgcacaatgctgtcatccgtgttaaagcccccggtcaccaatacggccgcgcccgcttcaagcgcctgcctgtgtgcattgattctgtttccgacaatcaaaagattccccgctgcggtgtaacgcatcatcgcgtcaagctccatcgcgccgatgacgaatttattcaatgtcttatggagccctgccctgcctccgagcacttgtccgtctataacatttacaacctctgcataggtaagcttttcaatgttctcttttttcttttgttcaattctgattgtgcccacacgttcaatcgtgctgacaaaccctttattctctgcttccttgatcgctctgtacgcggttccttcgcttactttcatttcctttgcaattcttcggacagaaattttttcaccgacaggcagtgaatcgatatacgttaaaatttgttcatgcttcgttgccaagcctttcacctctaaggacagtcttcttgtttttattataaggtttcaaaggatttatacgcaatgaggctggaaaataaaaaagaagcccgaccggcttcttacagcgttgatttcgtcccagtcaagcgcaaggaccccgtggctccttttacatcgtaaagcggaaaaacctttatttttcttttaaatggacatcaaccgctgtcttaacaatatttcgattccctattttagataaaacaaataaaactgcaaatagccatatcgcccctatggccgtatagatcaatggataaacagctttgtttgcgatccattcatttattaatgttctggcatttaccagaataataaatcctcctacaagcacacccatcaattgcggatgaaacttctgcaccagccatgctgcgataggggcagcgataattccgccggccattagtgaaaacacccataaccaattgacgtcctcccatcctaatgaaataagaaaaccggcggttgcagatacggcgatggcaaattcacttgtgtctacagtcccgacaactttcctcgggctcaagcctttgcgggataataaaatcggagtggtcaccggtccccagccgcctccgcctgtggcatctgcaaaaccagcgatcactcccaatgggatggattgttttcggtttaacggcacatgcttcttctcaagagccggcttatattgaaataaaaacctgatcaatacatatccgcccagaaggagcaaaaacaaagaaatatagggtttcgccacatctccaggtaattggctgaggaatgccgcgcctaaaaaagcgcctatagagccgggaatgacaagctgataaacggtttgtttgtcaacattgccaaatttaatatgcgacactcccgatgcggcagtcgttacgacttccgctaaatggacagaagccgaagccacagcaggtgtgatgccaaacgccaataacaaagaagttgaggtaaccccataagccatacctaacgaaccgtctattaactgcgacaataaaccaataaatgcaaaaacgattaatttcttcatcagaacaccccatctatatcaatcagatatttttgactcttcattcgaatctaacaatctcttggcgctttcatataaaaaataagaggctttgataatggcagtttcatcaattgtaaatgcagggtggtgccaatcatgatcaccgtctgttccaaaaaacgcaaaggatcccggaatatgctcaagataataagcaaaatcttcccccgcggttgatgggtcgggatcaatgacttgaagtttcgctttatgcgcagcgtctcgcaccagccccgtaattgcctcatcattacaaagcggcggcggtccggaatgccacttcacatttgcctttaacgagaatgcggcagaaatctgctctgcgactgccaaaaaacgctgtttcacttgatcacgaacctctgaatcaaatgtacgaacagtgccctcaatgacaactgtatccggaatgacattccaagtgctgccgccgttgattttccctacggttaaaatcgcgctttgcagcgggtttacatttctgcttacaatcgtttgcagggcgacaataagctgagaggcgccgacaattggatcaaaaccattatgcggcaatgctgcatgagcacctttcccttctatctttactttaaatcggtcaacagcagccataagcgggcctgtttttaaccctacagtcccaaccgcgatatccggtttattgtgaagtccaataaccgcatcaatgccatccagttggccgtcctctatcacttttgcagcgcctgcacccgcttcctctgccggctgaaataataaacgaacctttcctttcagactgtcttgattttccttcaataaaaagaccgcaccaagaagcgctgccgtatgaaaatcatgaccgcacgcatgcatgatccctttatgtttagacgcataaggcaatcctgttttttcttcaattggcaaggcgtcaatatcagccctcaaagcaatcgccggaccttctgactcccctgctatgtctgcgaacacacccgtttttagagcagtagggcgaatctgtatccccttttctttaaggcatttttttataaaagcagttgtttcaaattcttcttttgacagttcaggatattggtgcaggtgccggcgaatgccgatgagctgcttttctagcgttgagagatttacgggattatactcccctttcaacttcaggatgtcatttcctgtagtctgatatggataggagccttctatatttctccaataatccaaagacatatgtaccgctcctttccctatcccaatatattttcttcagactcttcaacataagatgaaataaatcggttcaatttatcagcaagaccgcccgccccaaatcttatatacttgctggaaactttcggattatcttctttcaaaaaacttaaaaaagataaaatataaatgcgcctgtaagctacttgtgtaattccgtactcaaaaaaccagttatcaatgacattgtatacgcctcggttgacgccatataggttgttacatttcttgtaaaagcagagatccggaagatttaactcctgatgggaaagcaggctttcttttttgttcggtgccataatcccaatcagttcaaagcgttttgcaacgcaccaaatatcctttttaatttgctttgttaaagactccaaagaatcaaaccttctttcttctctaattttaaagagaatgctgcattcgattttttctccatagatgtctctatgaaagtcaaacaaaaaaatctccaatgtccttttaaggttagagcccaccgtcggtttcacaccgatattcataacccctaaatggaattggtgattgactgtcgccagaactccataaactccattacgcagcccatgcatttttgcatctacatttgccgtggggaatccaagctttctgcctaattgttttcctttcacaaccgtaccggcaatgatcgtcaaaaaagtcagcctcctctctcagcttccgcattcgatcagacgaaacctaatgatgtgatgaatgtaaaacggattgatgctgcggaatgccaagaccgagattttcccgcaatgtcccgccgcgataatcttgacgataaagccctctttcttgaagaatcggaatcaccttttctacaaaagcatcaagtgttcccggtatatccgacccaatgataaacccatccgccgcctcagcgttgaaccaagtttcaattaaggatgcgacacgctctggtgttccgatgaatagagtccgtggaaaagccatttcctgtgctacctcccgcaatgtcagatttctggcttttgcttctctcttaatccggtctgttgtgctttgaaacgcattctttcccacatcgccaatatcgggaaatggctcatccaacgggtaaacactcagatcataatcatcaaaaaaacgagccaaataagtaacagcattttcaatcggtatcaattctgcaaattcacgatacttcttttccgcctcttcttccgtatctgccacaatcgggctgatccctggaaaaatccgcacacttgaaggatcacgcccttcatcagcagctcgccttttcacatccgcataaaacgcttttgtctcttctaatgaattggaatgggtaaaaatcgcatccgcatttttggcggcaaactgccggcctgtttctgatgaacccgcttgaaacactacaggctctccctgtttagagcgcccgatattcaagggcccctctacttgaaaatactttcctttgtgattcaggcgatgaagcttctccggttcaaaaaattgccctgttttcttattgtgtataaatgcgtcatgctcccaggaattccacagcccgcgcacaacatccaaatgctcctgcgcgatttcgtaacgctcagtgtgttcaggcagattggacttactatgattgcgcgccgccccttcctgcggcgaagtaaccagattccagccggccctgcccccgctgatatggtccagcgacattaattgtctggaaatagtgaatggctcagtaaaagatgtagagaacgtccctactaaaccaatatttttggtaaccgatgccagcgcagataaaatggtgatcggttcaaaacggtttaaaaaatgaggaatcgatttttcagaaataaataagccgtctgcaatgaaaataaaactaaacaaacctttttcagctgtttgcgcctttttcatgtaaaattcaatattcgtgctggccgagggatcaacatcgggatgacgccagccgtcagttgttcccccgacaccgtgaatcatggctccaaactgaataaaatctgaacgtgtcatctttttgcctcctttatctgtgcatgattagcaagtgcaagatcaaggtgttcaatgccgatttcagttatcccttgatagtgattgccgcgcccgatttcgaccacaggcacatggcgtaccccatatttcgcctgtaaaatatctcgaagttcctctttctctgaaacatcgatattttggaacgggaaccctttttcattcaaataattcttgacttcctcacaatacgaacagccttttttactccaaaccacaatgttcaaaacatcactcattcttctgaacctccttaacgttttgcagctaaaactgcatcgctcagcagctgataagacagctgtttttcttcagtatttttgatcggtgtaaaaataacaaaatcattgattttgtatgtgcctgataaacgtgttaattcttctgccacttcttcctttgttccggcaataatcccggttttttgcacgatgatgtcatagggctctgtgacgttttccagataggcctcagcctgttcgcgggaaccgacgttgaccttacgcccgtctttcaaatccacttttatcgattcacgcgacacaatatgtttttccgcttcttcttttgtatgtgccgcaaaaacagcgggggcaagatgaaattcagcctcagatcctggcgggagatgcgcgtcaaatgctcggcgggcttccttcagcacttcctcttcaccgttaataaagtaagcaaagacaaaagagattcccagttttgcagccgaaatggcactctctgcgcttcctcccaatagaaaaatacccggcttctgatcaacctgcggcctaggacgcaatgcggcatagcggtgggtatcaggaaaatcatcccgaacgaaatgagtaagctcctccagtttttcatcaaactgacgcaccggttttttatattcggcctgcagcgcgtctgtggacagctgaaacccgccgggcgctttgcccactccaagatctatacggccgggagctaacgctgatagaagatggaattgctccgctactttataagagctgtaatgctgcagcatcactccgcctgatgctaaacgaatttttcttgtgcttgcagcaagatagcctaaaagaacctcgggtgcagaccctgcaatctcatcattgttgtgatgttcggccacccaaaatcggtgatatccacactcttcagccatttgtgccaagttcactgtatgctgtaatgtatcagctgctgtctccccttcaccaatcaagctttggtctaaaatacttaagcggatcatatcaccggctcctttatgtgttcttttggttcaaataaatattccggcgaaacacggcggagaaactgcctcgttctgtcttttttggtatggcgaaagacttcctccggggttccttgttcaacaatgactccttcatccataaaaacaacttgatcagagactcttcttgcaaactccatttcatgtgtaacaacaatcatggtggctccggttttcacgatttccagcattacctcaagcacttcaccgaccagctccggatcaagcgctgccgtgggctcatcgaacagcagcacatcaggatgaatggcaagcgcccttgctatccctaccctctgcttttgtcctcccgataactgactcggataagcgttcaatttatcttgaagcccgacctttctcagttcattttccgctacggcatacgcgtcttgttttctcattttccgggcaatcgtcaagccctccatgacattttcaatcaccgttttgtgagcaaacaggtggtattgctgaaataccattgccgtctgttttctgagccagtgaacctcttttttggacggaaagctgcaattaatcactttgtcatgtatagaaatgatcccttcgtctggacgttctaataaattcaggcaccgtaaaaaggtggttttccctgatccgctcggcccgataatcgtcacaacttctcccttgcgtaccgtgagatttatcccttttaatacatggtggatgccaaactgtttatggatatttttaatctcaatcataaagtgcctccttgaaatctggctgcctttctctctaatactccatttgcggattctaggattagagtcagcacccaatagataatcgctgctccgataaacgcttctaaaaatgcataattatcagaagcaacgatagtcgccgtccctgtaatctctgggacagccactatagccgcgatagaggtggtatgcaaaaagccgatacccaaatttgtgaagtttgggatggaaaccatcagcgcctgcggcaatattacacgccgaaaggtttggctgtgtgtcaagccgattgaataagccgcttcgacctgtccggtatccatcgccagaatgcctgaccggatgatttctgtgagataagctccggcagttaaagacaaggccatgatgacaaacatggagaccggtatctcattggcggaccagccgagatgaaaaaaactgctgacttgatctgcaacaggaggtatccctaaataaatcaacataatgtgaaggattgcaggtgtacttcgaaagaaagacacataaaaccttgagcaagccaccaagcccttaattctaaaaattctaacaattatatttccaagagccacgagaaatccaaacacaatcggcaaaacagccatcatcaatgtcagaggaatggtctttaccatttctttcatggcggaaacgataaatggaaagtcaaattgcaatcttctcccccctcatccgaagaaatatatcaatgtatgttcatgtcaaaaacagtaacaatccttgtttgattcttcttgattcgtttttctgccactcgaaagaaccattcgaataaaactgcaacagcataataaacaatcgatagcgcaatgtaaacttcaagagaatggttgcttgaggtaatcagtgtttggccccttccggacatatccataacacctattgaaaaagctagagatgtatcttttaaagaactgatcaccatgtttcccatattcggaaatgcctggacaagtgcctggggcagaacgattcgcctgaaggcctgactaccgcttaagccaatactgtacgccgcttccgtttggcctttatctacactgcccacccccgctcgaatgatttctgcggctgccgctgcattgcttaacgcgtaggttgcgacagcagcataaaacgggtccatttttgatgtatcaatcccgataagtcccgtaagcgccgggattccgtaaaacacgatgaaaagctgcaccatgataggcgttcccctgaaaaatgagatatacacttttgccaattgatttacaattggaatattgtagatgcggggcagtgccagaaagagtcctaatacaaaaccgaaaagcaaggacagtgttaaaatgtataatgtaaccggtaaataagcggttaacgtcggcacaaaatctccaatcatgttcatatcaaacgctttttccatcactgctccctctcttttcacctaatactgctctttggaatagtcgtcaccaagccattttaaactgagttttttcagcgttccgtcatcaatgatttcctgtaaggctttatcaatatcgtcacttaacgtttgttcatttttgttaaacataaaatacactttggcatttgaaagcacatgaccgacggttttttctttaatagcgctcgtcttgttttgaaagtctactgcaaaaggcgttgagatcgttgcgtccgcacgccccgatttcagctgattcgcagtctcatttgcgccttggccctcataggcaatctcaaacggccgtccattatcctcattccattttttcagtacaagcgctccgttggaggttgcactcgtaatcacccgttttccttttaagtcttcaattccacggatcgtatcgttattttgaagcacagtaatttttaaaggaaaatggttgtaagcaaccttgttaaacagaaattttttctcacgctctttgcttttctccatttgatgtgccacgatatcgactttatgctgtccgaggctgacaagcaggttggaaaattccatcgttttaaatgtgaatttataatgtggcaggcgcttatcaagctctttgatcagttcgacatcataaccggttaaatcgcctttttcatcaataaagcaaatattcggaaattgggttccagttccgaccgtgatcgtctgtaccttcttttgcccggctcccgtcgtttgactgcctgcaccgcaagctgacagaactgttataagcgaaaataatattgccatgaatgctgttttcgttttcatctcatcgccccatttatttttcaaaacttgattttgaataatctgccccgagccattttcggcttagtttttttagcgttccgtttttctccagctttttaatcgcttgatccgtgtcatccgccaaggtttggctgcctttattaaacataaagtacacctcggtatctaataacacgtcaccgactgtcttttggcggaaggcgtgcgttttattctgaaaatcgacggcaatcggtgtagctatcgttgcatctgcgcgcccggtttcaatttgattggcggtatcattgcttccctgtcccgcatatttcaaatgaattgggctgccgtgcgttttgttgtactttgtaatataatctgccgcatttgacgtggcgccaactatgactgtttttccgtgtaagtcttttaatgtatgaatcttgtgattatcctctttcaccgtgatgtacatcggcgagtagttatatgggactttatgatacaaaaaacgcttttctcgttctttatttttggccatattgtgcgcaatcacatcaatttttttatttccgagactcgtcagcaaatttgagaaatccatcgttttaaattcaaatgtatattgaggcaactccttatcgatggctttcatcacttcaatgtcatacccggtcaattcacctttttcatttaaaaacgcaatattcggaaaatctgttccagtgccgactatgaccgtttgagcctgacgatctgttttgttatttgtttgcgaacatcccccgccaagtaatgcaaacactgacagcagcaaaaccaatcctttacgcttattcataggctgcctcacatcatgcccagctgggcgcacctaaaagcgttgggttaaatcgttccggaatcagaaccttgtgcatcatcacacctatgtccccgtctttttcctgctcaaaatacacttcataccctctccttctgtacatgtcagcaagccaaggatgcttgcgcgccgatgtgccgagtgtcagcgcaggagccttcagcatatctcgaagcactttttcttcaacatacgtaagcagcttacttccggcgccttgccctttatattccggcagtgtcgcaaaccaccacacaaatggatattttgaaggaggcgtctcactctcccacgggaacctgattgtaatcgttgaaatcagcttcccatcccgctccagcacaatcgctgaatgatgttcaatattttctgataccatttggatatcagctctcgtggatggccaatcaatatccagctgccgaatgggctgaaatgcgctgttaaccagtttcaacagctccgatgcatcttcaacagttgccagtcgaaaaatatcatcactcatttttgtcactcctcttcacaatatatataattcctatttgtttactaatcttttattgtttatactataaagcatactctgatctttgactaatcaaaaaaagtaaaccttcacttcagtaattttaatgatgaaaaacaggagggagaacattggagttacgctcaatcaaaacgtttcatacgattgtaaaatttggaagcttctataaagctgcagaaatactcaactactcgcagccgacgatatcgatgcgtatgaagcaattggagcaggatttaggcgtactgctgtttgaaagaggaaaaagcctgcagctgacaaaagcagggaaacttttttatgaacgaacaggagatcttttgatgcaatacgaggcgcttaaacacaacctctccgacttaaaggaagaagaggcaggcattatcaacataggggtttcagagccaaccgccagtctgatattccccgagattttaaaggatttcttaaaggattacccaaagataacagttaatatcaaggttgatgacgccaatacctgcagtcaaaagctcttagacgggacgattgattttgcagtctgcggcgagccggagctgattcttgaaaattactaccatccatttttttatgacacattaaatgtgattgtatctgagcaacatccgctcgctgagaagaaggctgtccatttgtctgatttagcagaagagcgcttcatatttacgcccgccaattgccccattcgcttacaaattgaacagcatttacatagagaactcgggaatcgttacaaaaaaatggagctcacaagcagcatgtcacatgaatattacgtacgtgaaaacatcggaatttcaatctttaccagcaccgcacattctaaaccgttcaacggcactaaagtcattccaattctgaacctggatatcaccccgcccatagggctgttgacaaatcaaaaagaagttcattttgaccgcgccacgaaggacttgatcgcccggataaccaaacgttttcagcagcgcagcaaagaattggaaggaacctctgataagaccattacaggataactgaaaaaataaaaaccacctcctgattcatcaggagatggtttcacggtttaaagctcgatcgtctcaccgaccgacatgactttgccgactccgcccggcaggctgtcagcgaatgcttctgggtcttgttcgatgaccgggaatgtattgtaatgcaccggcacgacctgttttgcgcgcagccattcagcagcaagcttggcgtcttcaggccccattgtaaagttatcgccaatcggaaggaaagcaaggtcgatatgattcaattcgccaatgagtttcatatcagagaaaagtgccgtatcgcccgcgtggaaaatcgttttatcttctacagtcagcaaaataccggcaggcatgcctgtgtaagtgatcgttttgttttcttcatctgtgatggctgatccatgaaaggcctgtgtgagcttcacttttccaaaatcgaactggcgggagccgccaatatgcattggatgaacattcaagcctttccagcctaagtacacagcgagctcgttcggggctataaccaacgcgttattttgcttggcgatttgttcagtatcaccgacatggtcattgtggccgtgcgttaataagatgacatccgcttttacatcctccggctttatatccgttaatgaattccctgttaaaaacggatcaaaaataatatgatggtccttcgtttccactgtgattacagaatgtccgtgatatgtcactttcatttctttcacctcgtcacatgattttgatttttttattttccctttttaaaaagctgaaaaacttatgttgtttgattcttgttaatgacattgaggccaccggtggcttcaatgacagtccctgtcacaaggtctgagttctcctcacacaagaaagcgataatccgggcgatatcctcgcctgtaccggatcttcctatcggcgttttttctttgccgattcgcattctggcttcctctatcgatgcttctttcatgtcgccgacaatgtctcccgggcaaaccatgttggcggttatgccgaattcggcttcttcaatggcaattgtcttcgtcaaagaagccaagcccactttcgcagcgccaaatgccgatcggtgaagccagccgggcgcgtgagccgcaccttggaatccgtacgtaatgatgcgtccaaattgctgttttctcataataggaataaccgctttgaataaatgaaagacggcgcttaaatttccttccagcatgccataccattcatcatcagtataatcggctaactttttacgttcaaatatgtatggtcccgcgttgttaatcaaaaagtcgatccttccgaagcggtttaaggcagcctctgcaatacgcagcagatcttcttttttggtgacatcaccttttacaaattgcagccggtcaagacaatcgggacaggcttccttcaggcggctgactgcctcctcatcctgtctgtaattgactgttactgaatacccctttgcaagcaacgtttcagtcactttgcggcctaaacccttcgaaccggcagtaattaaagcatgtcgcacatgaatacctcccaaagcaacgtcgccgctttcaataaagtgtttcttcttctactttactataaaaggcttgcaatatcactttttacactttggcatacaaaaaaagctgcctgtacagacagcttattctgcaggagatgaagactcctgatcaggcatatcgacataaccgctttgatatgcttctgaaatgagccttgttgtctcctggctttcttgttcatcataaatatagcgttccggttcttttttcatcattctgcctcccatcattatagaggtaggttggctataatgacgggattttatgaaggaaattttaacaaactcctgctgctacgcaagctttcgctttttcaagcgcctgctttacctgtttgaatccggtgcccccggcgctcattcttttttcaactgcgtagtaagggtctaacacagtgtaaatatcttcttcgaatagtgtgctcgcctgctgaaactcgccaaacggcatatcgcttaaatagatccctctttcgatgcatgtgtacacaagtttcccgaccacttcatgcgcttctctgaacggcattccctttttagctaaataatccgccagttccgtcgcatttgaaaagtcttgttttgttgcttgcttcatgacgtctttgtttacagtcattgtttggatcatgcctgtgaagatttgcaggctgccctccaccgttttcaccgtgtcaaacatgccctctttgtcttcctgcagatctttgttgtaagcgagcggaagtcctttcatgatcgtaaacagccccatcatatcaccgtatacgcgtcctgttttgccgcggatcagctccgccatatcagggtttttcttttgcggcatcatgctgcttcctgttgcgtacgtatcgtcaagctcgatgaatttaaactcctgcgagcaccataaaatgatttcttcagagaaacgggataggtgcatcatcagcatactgctgttgcttaaaaactccaaaatgaagtctctgtcgctgacgccgtccaagctgttttcataaatggcatcaaagccgagcagttccgctgaataatcacggtcaattgggaaggttgttcccgcgagcgccccgcagccgagcggagatttgttaatccgcttcattgaatcctgaaaacgctccttgtcgcgctcaagcatccagaaatacgcaagcatatggtgagcgaatgaaatcggctgggcgcgctgcagatgtgtgtagcccggcagaatcgtttcaacgttcgcttccgccttttcaatcagcgcactttggaatgcctcaatcagctcgatgatgtggccgacatgattcttcaagtataaatgcatgtcagtcgccacctggtcattccggcttctgccggtatgcagcttgccgccaagaggaccgatttcgtcaatgagcattttctcaatgttcaaatgaatatcctcataatcgactgagaattccaatgctccctcctctgctttttgcaaaagggtattcaggccctctcggattttcaactcttcttctgctgtcagaataccgcattttttcagcatggcagcatgtgcgagagaccctgtaatgtcttcagcaactaaattttggtcaaatgatatggacgcgccgaactcgtcgacccatttttccggtgttttttgaaatcggcctccccagagcttcttcatgctttaatctgctccttcttttttacgatgctgttcacttttgtcggaagtccccaaagctcgataaatccaattgctgcatggtgatcaaatgcatcgtcttttgtatatgttgcaagtttttcatcatatagagagtattctgatttacgtccttctacaattgcatggcctttaaacagcttcacgcggacaatgcctgtgacatgcttttgcgtttcttttaagaaagcgtgcagcgcatcttttaacggcgagaaccataagccgttgtaaatgatctctgacattttttgctcgatgatcggtttaaagtgggctacctctttcaccagtgtcaaatcttctaattctttatgcgctttgatcagtgtcatcgcaccagggcattcgtatacttcccgggatttaatgccgacgaggcggttttccacgtggtcgatacgtccgacaccgtgcgcgcccgccatttcattcagcttcaagatcagctcagaaagcgagtaggaaacaccgtcaatggagacaggcacgccctgttcaaatgcaatttcaatcacttccggcgtgtccggcgttttttccagcggagctgttaaatcgtatgcaccttctggcggcgccgcccatggatcttctaaaatgccgcactcattggcgcgtccccagaggttttgatcgatagaatacgggctgtcaagattgatcggaatcggaatgccgcggctagccgcatattcaatttcttcttcacgtgaccactgccattcgcgaaccggcgcgatgacttctaggtcagggtttaatgatttaatggagacttcgaaacgaacctggtcatttcctttcccagtgcatccatgggcaatcgcctgtgcatcttctttttccgctatttcaaccagctttttcgcgatcagcggccgagataatgccgaaacgagcgggtattttccttcatacatcgtgtgggcctgcaaagaaataagcgcgtaatcctgtgcaaattcttcttttgcatcgatcacgtaggagtttgtcgcgccgacttcaagcgctttctgctgaacaaatgccaaatctttgccctcaccgacatccaggcagcaggcgatgacattatatccttgctcctgaagccattttattgcgacggaagtatcaagaccccctgagtatgctaatacgacttttttctgttctgacatgataaaaatcccctctcaaccgtgtttctattttgtataaaaataaattatatttaataaaaatacattttgtatgtatacactttaacaagtacgtttcgttttttcaagccttttacaaaaaaaacttcacctaaatttcaggtgaagtttcgtagtatttattcatttacttgtcttttctgatttctctgaccacatgtgcaagttcgggaataatcagcttattcattgccagctttaccgcgccgcttgagcctggcgttgagaaaacagcggtatgctgaatgacgccggcagttgctctcgacatgattgcggcagggccgatatcctctgtataactcagcatcctgaatatttctccaaagccgggcagttctttcgaaaacagcggcgttatggcttcaattgtgacatcccgatctgctatgcctgtccctccgtttaagagtaccgcgtctgtctgttcatccatgcagcccgcaagcactgaccgctgcaaagcatccttttcgtcttttacaatttcatatgcggcaatatgatgaccggcttcttctaaaaatgagatcatcagcttgccgcttttatcggtttcatctgtcctcgtgtcactgacagtaatcactttgcaccgaacgatatcgggagcttcttgtttatgctcttgaacgctcattggcccacctcttttatgttttctgtctgtcactatcatgcatcaacaaaaaagcacattcaagagaatgtgctttcatgcgatttattttgctaaacgaacaacgtcgcgcgcaatcatgacttcttcatcagtcggaatgatcatgacttttactggagaatgcggatagctgatgaaagcttcctcgccgcgcacgttattaagcgcaggatcccagtatacgcccatgaattctaaaccgcgaagaacgcgttctctgacttccacactgttttcaccgataccggcagtaaagatgatcgcatcgacaccgctcattcttgcagcgtaagaaccgatgtatttgtggattctgcttgcgaatacttcaagagccgtttccgcgcgctcatttccttctttcgttgcttcaacgatgtcacgaagatcgcttgagaaaccggaaatgccgagcagtccgctttttttgtttaatgtattcagtacttcgtcagccgtttggcctgttttctccatgatgtatgggatcagggcagggtcgatgtttccagagcgtgtgcccattgctacaccggcaagcggcgtaaagcccatggatgtgtcaatagattttccgccttcaacagcggcaatacttgctccgtttccaaggtggcaggaaatcaggcgcaagtcttttaacggacggccgagaagctctgccgcacgctcagttacatatttatgtgaagtgccgtggaagccgtatttacggatgccgaatttttcatagtattcatacggcaggctgtaaaggtaagactgctcaggcattgtttggtggaatgccgtatcaaatacagctaccgcaggaacatttggaagcacttctttgaacgctttaattccaacgatatttgccggattgtgaagcggtgccaattcagaaatatcttcgatttccttaatggtttcatccgttaataaaacagaatcgctgaatttttctccgccgtgaacgacacgatggccaattccgtcaatttcattcaagtctttaataatgccgaattccgttaacttattcagcagcattttaacagctaccgcatgatccggaatatcagttacttctgtatttttttcgccgttcacagaagttgtgaatacgctgtcggcgataccgattcgttcaactaaacccttcgttaaaacggtttctgaaggcatttcgaaaagctgaaatttcaaagacgagcttcctgcgttaattgcaataattttggacatgattgacgctcctttatactctgtatcaacaacttcgtttttcgtacttttttcccggtgaatatcaacatcttctccgaaaaatatctgacttttccatttaaacattgtcatgtcggcttttcaagtcaacttgcgtattgataacgcttacaataagaagtcgttattttcagacacattccctataggttttgtattgatgaacgcttacaatttgcggtttttccctctgtattttgtgtttcaaagctggattcaattcgtcaagtccggtcttcaaaagcataaataaaagcagcttaggcatcgacctcatacggctgtctaagctgcttttaaaacacttacttttcttttttaaaccattcatcaaattgagccatcatatcaagcatcgccttttgattggagaaagacggaagattcgcaagcagaatttgccccggcgctttcgtattctctccttgtttctgaagcacaaggatgcttttggcatgagcttcgtctttaaaaatagattttggcagctgcaacagtgcgttgatatgaaccttatctttgaaaaactgtttcagcttgccgctttgggagctctcaaacaaatgattcggaatcataaaaaataagtagccgcccggtttggtatgcttgacgctctgttcaataaacagatgatgagcgaaggaatggccttcgtcagctttaagctcaaacgcttctgctccttcgtcattcggataatagccgactggcagatcacaaatgaccgtgtcaactggatcgataaacaacggctcaaggctgtcctggtggaaaagctcaagctcttttttcagaaggttcgcttgggcataggcgatcttcaagagcacatcatcaatttcaatgccaaagctgtttgccgttttttcagacagctggttcagcacggtaaacagaaggttcccagttcccaaggctggatcaagaatggtcaattcctttttgtccgccataaacttattcaccaaatagctgatgaaaagcccgatcgtatccggcgtcatttgcctgtttggatgggagatatctttcattcctttaaggacggcaagctgaaaagccttgcgtacccactcatgctcatacgtgccgaattccgctttttcaagcagagcctgaagttgtttggttttctgatcagcaggcagtttcagctgatccgttttttcaagaaaatacatttctcctgcttcggcaagcgcctctatatatgaaatctgcaattcattctttatcataatcgctgcttcgtttaacagctcatacaccgcacctacatggtctttttgcatattgtgttcctccttgccatgaaaaaagctccggcggcagcctggagcttttttccctgcttacttcactaatgccttagcagcctcaattggcttttcatagttcgggtggtttgttgcttcgcttacatattcagcgtaaacgacttttccattctcatcaaggacaaatacggaacgcgcaagcagacgaagttctttaatatacacaccgaacgctttgccaaatgacatatctctgtggtcagacagtgtttccactttgtcaattccgttagcgccgcaccagcgcgcttgcgcgaatggaaggtctgcactgattgtgtagacgttgacatctccaagctttgcagcttcttcgttaaaacgtcgtgtttgtgcatcacaaacacctgtatcaattgaagggataacagaaataatcgttacctttcctttcatgtcagctaacgatttttcttcaaggctgttagtcagcactgtgaaatcaggagcttgatctcctaccttcacttcttgtccgacaagtgtaaccggaccgcctttgaatgtaatttcagccattataattcctcccttttgtatgtatgtctctatcatagtaaagtttcctgcaaactgcaaagtttatgccaaaaaaaagttaactgcggccagcgcagttaacctttttttaataattcatattgttcatttggttttgattttggccctgactttggttcttgttatttttcttgaacatttgctggatgcgttcgagtgtttgaggggctgcgtctaaaattttctctattaaatgggtattttcatctaaatgaagcattctgatgcctgtcgatccgacaattaaaaacgcgatcggcgtaatggacacaccgcccccgcttccgcctccgaaaggaagtttctgttctcttgtctcatcgtcttccgatttcttttcggccggctttccgccaaactcgcttccgcctgcggcgaatccaaatccaactttagaaacagttaaaatcacacttccatcaggcgtttctactggatctccgatgatggtgttaacatcaatcatttccttcaagttttccattgcggttttcattaatccttggatgggatggtctgccatatacgcttcctccttaaactgatgaatcattctttgaagtcattctagccgacggattcttctttaatacggatagctcccgtccgtatttgacgaatttgaaagctgcaagcatagcatgtccaaagcgaaaaaagaatatacactgaaaatgggtcttggaagcaggggcttgaaacgacgggatcacctcatagacaggtttattcacaaagtccaggtggtcgtagagcattgctgcgataccgcccttcacgccccatacagcacctgttaacacacctgtcactgccgcgtcctgaattccgattactgtaacccattctagttttgtgatatgtaaatgcgcgagaaaagacgcgctgattttccgtagtctggtgacctgatgcaaaagcatttcgattttattaatgctttgctgcacatcgttttgtgtaatttttttctttccgctgctttttttcattttagattcagttttttgtttgatatccactgttccgtcttctttgttcaccttaatcgccgggattgtttttttgatccttataaggccaaacagcgccgtaatcttcaaggtcaatttgtcattatcagcggcatgaagatactccagcgcgacatggattttcattctgagaagcagtacgatccctatgagaataagaatggctgtcagtacatacaccatattcttcacttcctctaggagcattatcgccaattcctaaaaaaataaacccggacggaggtccgggttatcggttatttgcggtataatttttcatgcaccacggtggtatccgcgatgtaatcatgaatcccttgttttgtaggtgaaaaagcaacaacgatatataaaatccaaatcttatcaatataccgtccaaccacttcacgaaaaatcactgtactccatgtcagcttgctatcttgcttcacagaaaccactttgaggccgaacaccattttaccaagcgtctgcctgaagtatttagtcattagtgcgaagtaggcaagatacacaataagcgttgtcacactgtaggccgagaaggtaaacatgccggatgttttcggcagatccaatacggtaaagaggggagaaacgagcaaatggtttaatccccatatcacgagccaatcaagcaggaaagcccagaaacgaacccaaaagccagcataggcatgtgtcagctgctccgcttcttgcgggcctttgatgtcattgcgctctaactcttcatatgtcgcgtccattattgttccctcctacttcgcatagagatacatcattctcggcgaaccggattgcgatagaatttctctcatattcaaaaaatcaatttcacttttaaacattttgttcgcgcccatggaaaacagtgagcctaatccgaagctttcctcataagaaatgacagaggcgtttttcaaatccttgtgatcctttttcatggccgtaatggtatcgtcataaaaaccaagctcatcaacgaggttcagttttttcgcctgccgtccgtcatacacgcggccgtccgcaattttctttacctctgctttcgacatgccgcgcccttttgaaatgacatcaacaaagccttcatacgaattatcaaccatcgattgcatgatgtttttttcttctttcgtcatctcacgggaaggagacataatgtccttatgggccccgctcttaatcgtttcataagaaatgccaagcttatcggcaagctttgaataattgacgctttccataatgacgccgagtgacccggtcagggtttccggtgtcgcaaaaaccttatcagccgctgttgagatgtaatagcctcctgatgctgccatcgaacccattgacacgtaaatcggttttttcgtttctttcttgatttcttccagtttcttatgtatttcagcactttcatacactccgccacccggagaattcaccttcagaacgatacctttgaccgtcttgtcatcttttgcgcgctcaaggttttttaagaacgttctgtggttatatccgtctgcaccaagcagactgcttgagtccccattatcctgaatggtgccgctgacctctaatacggcaattttacttgagagactgccgttttccagcgtcttttcctgcgattcatccgtcagtgatgtgagatccgtttgagcgcctttgacgctttcaaagaaactcatagagatgctgacgataatagacacgccgaaaatccccagagcaatcactaatgcaatccatctttttgcattcattttttctcctcctttttcctaaactctctcattatacgattcaatatgaaaaatgtttcacttcatgagaaagctccggcttaacgggctgccggcaaacgtggtacacttatggccaaaggtattttatcacaaatactggatggcagaaaaacttaaatatgacagcaaaggggaaatgggatatgaccgatcaacgccgtaatgtttatttttttcacaaacaggatcaggaaacgaacgaacaagcccgctcgttaacacaattagcggaagagcatggatttaccgttgtgaaccagcactcagacgccaatattatcgctagcattggcggggacggcacatttttgcaggcagtcagaaagacgaattttcgtgacgactgcttgtacgtcggcattaccaaaaaggggaaagctcatttatattgcgactttcatagtgatgagcgagaaaaaatggtcgatgcaatgacgtttgaacaaattgaagtgagaaaatacccgctgattgaagtgacagtggatcaagccagtccttttcactgcttaaacgaggtatccatccgctcaagcatcatcaaaacctttgtgatggacgtgctgattgacgatctgcactttgaaacgtttagaggtgacggaatgattatctcaacgcctacagggagcaccgcctataacaagtctgttgcaggagctgttgttgatccattgcttccatgcatgcaggtatcagagcttgcatcccttaacaataatacctaccggacactcggctcgccatttgtcctcagctctgaccgaaagctgacccttcgtgtggtgcaggacggcaacgaacacccaatcatcggcttggacaatgaagcactcagcacgagaaatgtgaaaacgatcgaaatcaaactgtctaataagaaaatcaaaacagtcaaactaaaggacaattcattttgggaaaaagtgaagcgtacttttttatagaaaataaaaggacaggctgctgcctgtccttttatgatttctcatatacaatctggccgttaatcacggtttttttaatatctaaaagatgaagctgtgcggggtcaatggcaaacggatcaccactgagaactgtaaaatccgcatcatagccttccgcaatttttccgcgtgacttctctttataaatgataccggcgctaccttctgtataaagctttatcgcttcatatacaggtaaacattcactttcattatagcttggcccgttttgctcatgactgcttttcctgaggaccgcggactggatccctagaagcgggtcaacaggctcaatcggggcgtctgaaccgcccgcgcataaaatgcctttagatatgagggttttccaggcaaatgcagtcttcatccggtcttttccgagacggtcaatgacccacggaaagtcgcttgcaacgaaatgcggctgaagatcaagtgcgatcggcatgcgtgctgctctctcgattaattcgttatcaagcacttgggcatgaataagccgatcatgccggccgtttttgggcggatgcttttcaattgcgttcagcactttttcaaaagcaagatctccgattgcatgaactgcaacctccatccctttttctctcgctttgcgaatgagccggccaagggtttcatcatcgtgaacctgaacaccatttgttgatggatcatcctgatatggttctttcaataaagccgttctcccgccaagcgccccgtccgcaaagattttcatcgcaccgaactccacatacgggccggacagcttctccagctgctcccatcgatcgaccgcttcatgatgaacgagcaaatggcagcgaaacggatactttccgccagcggcagctttctcataagctttcaacggcaccgaaacatcaccataataggacaagtcttccgaatgaccgcccgtcaggccttttgtccagcaatcctttattgcagccgttaatgcctcatcaacatagtgctgagagactggcgggacagccttcagaatcaaatcctgcgccttatcaaacaggagtccggacggctctccatttgcatcttttacgatgactccgccgtcagggtcaggagtatttcttgaaattcccgctgcttgaagagccgcagaattgacagctattgcatgccggcatatacgcttgagcaagacgggtctgtctggaaacaggcgatcaagatcatgcttagtcaagtagtcaggtgtcccaaactgattttcattccagccctctccaatgagccaatcgtttttaggaagctgccgctctctttccttcgcagcctgtaaaattgaatctttcgacgtcagtgcggacagatcgagctgaagctgtttctcaccgtggccgatcaaatgtaggtggctgtcaacaaaaccggggaacatcactgcaccgttcaggctgatttcttctgtttccggtgacccgtacttttccttcaaacgttcatagctgccggtgccttttatgacaccatcctcaacataaactgcctcagtccgatcgccttcttcgagcatcgtataaatgaaaccgccgtgccatatcgccttcattcacgttcactctctttctttacgcctttttattggctttgagctgttcttcacgttttcttaattccactcgtctgatttttgcagaagccgttttcggcaggctttccacaaattcaatttctctaggatatttgtatggagcggtaatcgtcttcacatggttttgcagcattttgacaagctcatcactgcgtttttcatgattttgcaggacaacatatgcctttacgatggagcctctgatttcatcagggcttgcgacaacagcacattcttttacttctgggtgcttaacaagcgcgtcttccacctcgaaaggcccgatcgtatagccggagctgataataatatcgtcatttcggctttcaaaccagaagtaaccttcctcatcttttcttgctctgtctcccgttaggaaataatcgccgcgaatttgtgttttcattctttccggatctttaaaatactctttaaagagcgcaggcgtactgaggtgaacagcgatatcgccaacctcaccaggtttgcagatttcaccgtcttcatttatgatctccacctgatttcccggtgtcggttttcccatgcttcccggtttaataggcgtatctttcaaaacaccaaccaaaagcgtgctttctgtttggccatatccgtcccgtaccttaatgccaaagtgcttttggaaaacatcaatgacttcacggttgagcggctcacctgcggaaacagcgctgtgcagggcagaaagatcaaagcgttccaagccttcaaccttcgccattaagcggtattctgtcggagtgcagcagaaaacattgattttgtagcgatttaaaagctctagatatttttctgctttgaatctgccgtggtacacaaaaccggttgctccgctgccaagcaccgctaaaaacggactccatacccacttttgccagccaggggcagcagttgcccagacgatatccttttcagaaatgtcaagccaagcgccggcagaagtttttaaatgagcaaatgcccatccatgtgtatgtacaacacctttcggctgacctgttgtcccggatgtataagataagaaagccatatcatctcttgttgtgtcagctgttttaaattggcttccgtccgcttcaattgataagaggtttttccagccggcatcattttcaccaatagacagtgtaatcagtttgtcagtcgtactgacatcccggaaagcgccaataaattcggagtagacgatagcgccttttacctctgcatgttcaatccggtattcaagatctttcgcgcgaagcatttcggagcacggaatgacaaccattcctgatttcaggatagccaaataaacagcataggcttcaagcacccgcggaaccattacaatcagcttgtctccctttttaaatccaagatcagctaaggccgctccgattttatttgtttcttccatcagcttttcatacgaccaagattcttgcttgcccgactcgtcctcccaaagaagagcggttttttgtccagcggcactgaacttttccatttcattcactaaattatattgcataggggcaattaaatcttcacgttttaacacgaacaactcctcactttctccacccattatacataaatacaggctctttccgtaaggatatgcctaaaagcaacctctgtaaacatagattttataggccgctggtccttttttatattataaaaaatgaaaaggagtggggatacccccactcctaagccattatgtgaaattgtaaattagaattgtcctccgcccatgttttgttgagcaaaagatacaagacgttttgtgatctctcctccaacagaaccgttagcgcgagaagttgtgtctgctccaaggtttacaccgaattcagaagcgatttctaatttcatttggtcgatcgcttgagcagctcctggtactaaaaggttgttgctgttacctgagttattgttagccatgtgtctcacctccttgtgagtatagaatgtgtcaaaacacatggcttcattcagaaaaactttggtaattgtatacaggagctgaaaattgatttaaaagagttcagcgaatttatcgttagcttcttgttcgctataaagggtcattgtctcaatgttatctaccgcttcttgaatatacggctcgaaatcaacaaagctttcaaagtgttcaattttctcttttttagggcgtgttttcgggcttggcggtgtaaagatcgtgcagcagtcttcaaatggctgaatgcttgtctcatatgtgccaatttcccgtgatttttcgatgatttctgttttgtccatggcgattagcggacgcaaaatcggtgttgacgtcaccgcattaattgcatacatgctttcaagcgtttggctcgctacctgaccgaggctttctcccgtaataatggcaagcccgtttctcttttctctgattctgtcggctatctgaagcatgaggcggcgggttgccgtcattgtgtaattttcaggaatttgtttttggatgagctcttgcgtttttgtaaatggaacaatatgaagtgtcatgcttcccccaaaacgggacagacatttcgccagatccattaccttttgctttgcgcgctcgcttgtgtatggcgggctgaagaaatgaacagcttctaccgacaatccccgtttcatcgcataaaaaccggccacagggctgtcaaaaccgccagaaagcatcagcatcgcttttcctgctgaaccaactggcagcccgcctgcacctttttcatcacgaattgtcaaaaatgttgcttcttccctgatttcgattctgagcgggatgtctgggttgcgaacatcgaccgtcaatccttctgtatttcgcaaaatatggccgccgatttcagcgttcatctggtttgtatctaattcaaattgcttatacgctctctttgtcgcgactttaaacgtatcacctggtttatactgatctttgatagcctttagtgcggttgccttaatatcatcaaggcggctgtcacatttaattgccaggctgaagctttgaatcccaaacacttgctttaaatgaggaaaaagagcctcaggatcctctccatttaatgtaatcgtcatacgatccctgttggaaaagtattttaaattcggatagtctttcaaaacgagtctgatgttttgttttaagcgctcaataaagctttttctgtttttgcctttggtcgaaatttccccaaaacgaattaatatatgatcgtaattcatgttctacctcatcattttccttaattttttgataccaggacgaagcgcgttcataaacggttctgccacatcgcttgtctggctgtaatttaaactgattctgatgctgcttccggcaatctgctctcctttgcccatctctaagagaaccttgctgggcttatgttcttttgccgagcaagccgatgttgtggagacgaaaatatcctgttcctcaagcatgtgtaaaagcacttccgctttaatccccggtacagagaaattaataatgtgcggcgcgctattcatttgaggcgtgttgataacgacgccctcaatttcactcagccttttcataaacaattcctttgcggcagtcatcgtgtcaagccgtgtgtcaaaatcagcagaggcaagattaatggccttggcaagcgaaaccgctccagcagtatgttctgttccggcccgtatgcctttttgctgagagcctcccgttatgagcggaataaggcgtgttccctcttttacaataagtgcgcctgtcccctttaggccgtgaaatttatgccccgaaattgaacatagatcaatgccggccttttcaattgccaagggcactttatagatgccctgcacataatcgacgtggaacaaaatgttcgggtgcttcttcagcacttcccctgccgcttcaatcggctgcacggaaccgacttcattgttcacatgcatcatgctgacaagcacggtatcgggacggatggctgcttttagatcttcaatagaaacaaatccgtcttcattcacagaaagataagtgatatcaaacccgaacaactctttcagctgttctaacgattccgtaacagatggatgttcaatagaagtggcaatgatatgtttgcctgtttttatctttgacaaagccgctccttttaaagccgcattattggcttctgtggcgcctgacgtaaatacaatatcatatttttttaggcctaaggaccttttgatttgatttttggctgcttgaagcagctgttccgtttcggctccatatcggtgcaaagatgaaggattgccaaagtatcggctgcttgtctgttcatatacgttcaagacttcatcgtaaggcttcgtcgttgaactattatctaaatatatcatcttttttactcctttatgaaagcggtacaaggtatgatatttatgttaccataacaaaatttaatagaaaattacgaaaaactagtattgacttctaatttttttaccatataataagatttgttcgtttcgtcatattatctgacaattaattgacagaatattttaacataattattaggaggatttttttcatgaaacactcactgcctgtcaaagataccattattattggtttcatgctatttgcgttattctttggagcaggaaatatgatttatccgccggaacttggacaagcagccggacacaacgtctggaaggccatcggcggatttttactgacaggggtaggcctgccgcttctcggcattatcgccatcgcattaaccggtaaggacgctaaaggccttgctgacaaagcgcaccctgttttcggcacaatctttactgtcgtgctttatttatcaatcggaccattattcgccatcccgagaacaggaactgtttcatatgaaattggcgctgttccgtttttgactggcgtaccagaaagactttctttattaatatttacacttatctttttcggcgttacgtactatttagcgttaaacccatccaaggttgtcgatcgagtcggaaaaattctgactcccatcaaattcacgattattttaatcattgttctcaaagccatcttcacgccgatgggcggattgggcgccgtgacagaagcatataaaggaacaccggtttttaaaggatttttagaaggctataaaacaatggacgcacttgcttcaattgtatttggcgttgtcgttgtaaatgctgtaaaaagcaaaggcgttacacagtctaaagctcttgctgcagcctgcattaaagcaggtgtgattgccgctttaggcctgactttcatttatgtatcccttgcttatttaggtgcaacaagcacaaatgccatcggtcctgttggtgaaggagctaaaattttatctgcatcttcccattatttattcggttcattgggcaacatcgtactcggagcagcgattacagtcgcatgtttaacaacaagcatcggccttgtcacatcttgcggccaatatttttcaaaacttattccggcattatcatataaaattgtcgttacgattgtcacgttattcagcttgatcattgcgaattttggactcgcgcaaattatcgcgttttctgttcctattttatcagctatctatccgcttgccattgtcattatcgttctttccttcatcgataagatctttaaagaaagacgcgaagtgtacatcgcatgcttgatcggtacaggacttttcagtattttagacggtatcaaagcagccggtttctcacttggatctttagatgtgtttctaaatgcgaatcttcctctttacagcctcggcatcggctgggtgcttccaggaatcgtcggagcggttatcggctatgtgctgaccttattcatcggaccatccaaacagcttaatgaaataagttaatgtcacagaacgcctgcgttattgcgcaggcgttttgtaataagaaaaagagcctgctcattacactgcgggctctttttcatggtcgtgattatctaagcggatatgtcagctttgattttttcaactgcacctggcgcagccttttctacagcggtagctgcaatttcataagagtcgtcataatcaaaagcataaaaacgtctttccgcttctttcagctgttcagataaaatatgattctggcttctgaaccggtttccgaactgaatgattttttcaatgaggatgacctgctcgacaagttcctctgattcccggcttgccctgttgacgatatcttctgcttgtttcaaatgggctccggcttcttccatatttaatggaagttcgtttagttgattgaccgtttcttgaatatgatgatgcgcgttctccagcatctcttgaatatggctcggaatgcctggaatgttgctagtcttcagcagtcttgctgtctcagaaattgtttttttcaaattgctgagcgtctccctcgcctgaagctcttcttttctcagcgcttgcagattttcacgatactcgtcatgctcttttttcacttcttcaatttgcttctctattgaagcaacttcttccactaaaagtgagtaggcaacatgctctgcatcgagcttatctttaacggatgatagcagcttcccaatttcatcaaggcgcttttcaaaagcctgctgtttgccgagctcaccggctgtcagcctgtagctttccttcaccagctcagtttccgccttcgtatgctctttctcttctttaagcttgtcgtaagcaataatcaattcaggcattttgcttagtacggattgaccggcttcaacttcgccctccagctgctgataaacagattgaatattttcgtcaatgagctgcaggattgcggacgcttcatcaatatccagctcagtcatcaggacatgttccgctcgtttcagctggtttgacagattttctaattccttatcaagctggatatgctcaagcttgtaccctttttctttcatttcgccatagccatccttgagctttgcaatctgtccgggcaccgtctgtttacagtcagctaacagcttcggcacatcatctatgtatgactgaagccgttcaagattgcggtcctgctcaagcagtacttttcttgcagtaatatagtttccgccttctgtttcttcttcaaattgtttgatgccgctccaaatttcgtccagatccttttcaaggctgtcataaagctccccgtaaaggtggctgtaagccagcaggttttttcgagatttcgaatagcgctccctcacctgttcaatctcttcacggctcttttcctcacttgtgacaagatcgctgatttcccgaagaatcttttcaatgcttgattcagccgctgtcagcaggtcgtcgatatgaacgagcacttgattggcctttttaaaccggtatttgtctgcattttcctcggcatcataaaggagctcttcaactttcggcatgtgggctgtgacaatctcatcccattcttcacgccacttctcaaagaactcttctgtctgacccgtcatttttaaatgttttattttagacatttcttccacgatcgaccgatttagaatttcaatcttccacgattccagccggtcgatttcggcgtagacttttttcctgaaaaagtagcctgccgcaaacagcgcaagcagtacaattaataatccaatgacaaactccataatgagcccccttgctgtttaccttaatctgtcagggtgttttatttattcagaaagatttcaggatatgtattgagaaaaactgtcgttttcattgttattatgataccatgtaacaaacattttttgaccagaaatcaaaaactttttgtgcaaaatcggcaggatttgactattttttcatggggtgacatcaatgcaaaagcgagacggacatattcacacaccattttgccctcacggctccaatgacacactcagacaatatgcagaagaagccttaaaaaaagggttcgaatcgattacttttaccgaacacgccccattgccgccctcttttaccgatcccacgccgctgaaagacagcgcgatggcgcaagcttctttggaacgctatattcatgaaatttccggattaaaaaaagaatatcgcggacagcttagtatacggacagggcttgaagtcgattatatcgctgaatttgaagacgaaattacattattcctggacacatacgggccatatttagatgacagcatcttatccgttcattttttgcgcacagactcttcctatctatgccttgattatgacgagcataccttcaaagagctgatttcagcctgcggaagcattgaagcggtatatgaacaatattaccggagtatctattcttccattgtagcatctctcggcgtttataagccaaaaagagtcggtcacatcacactcgtccaaaaattcatcaagctgtttccatacagcatgtcagaacatattcgcggcctcgtttccctgtgcctgaatgccattgaagaaaacggaatggagctcgacttcaatacttccggcttaagaaaaacttacgctggcggtatttatatcgaggattggatgctgaatgaagcgaagcaaaagaagatcccgcttgtgtttgggtcagatgcccatcaagcgggagatgtcggatatgcgtatgaggcgtttttggaacggtgctagttggtgagcgccacgtctcctgtccggaagacgcttctgatccaaatcttgatttcttcaaaatacattttataaaaatacggctcgtgcggctgcatgtagagtacttctgaaatatattgaggctggagatagggcatcatcaagagagattttaattggagaataaaatgaggcagcggcagcgttaaatattcacgctgtttttctccttcctcaatgatcagctggaagatatacttttccttcattagatatgtcgacataatttccctgattaatgtggagtcaattgtgacttcccggtagacaaaacgagttaattgacgatgattatgctgataggataaaatatcgaaaaccaattgaagaagctgttcctgagtgctttgagaagagatattgcttgccgctgtttcaagcgttttgctgtagccctcgtaaaactctgaaactaagtgttccatcaagcctcctttgcctttaaaatagtaggagatgtgcgcaacatttacatcagctgactttgcgatttcacggacagacgtgccagaaaatcctttttggttaaaaagcatgacagcagattcaataattttgtctttggtgcttactttcatacggctcactccttcctcttgatactattcaagcagaaagccgctgttcctgtaagaacttatcgacaaatgccggcagaaaagccggaactttgttttatattatagaaaaagtgagggttttccatgttccatgtcgaaaaacaatctggagataaagaaaaaggctatcagcttctgctaaaacagctcgaagccatgaccgaagacgaaacagatcaaatagctaactatgcaaatgcctcagcactgctgtatcattcgctgcctgaagtcaactgggcgggtttctattttgccaaagaagaggatggacagcttttgttaggtccgttccaaggcctgccggcatgtgttcggattcctttcggcagaggggtttgcggcacagcgtacgcaaacggaaaagtggaacgtgttgaggatgtaaactcgtttccgggacatatcgcctgcgatgcagcgtctcaatcagaaattgtgcttccgattcgtgtagacggaaaaattgtcggcgtcttggacatcgacagcccagtgaaaaaccgtttcgacgaaattgatgaaaaatacttaactcaatttgccgaaacgctagaaaaagcgttagcgcagtaatataaaagcccaaaactgatatcgttttgggctttttttattttattgagtcatgaaccatcaagcggtttttcccgctccgtttcgcgctgtagagcgcttcatctgcctcatgcacaagctctttcagcgacttttttgtttctgtcgtccagcaggagataccgcaggaaatggttacctcgggtttcgtattttttctgaccgcgtaaaccagtcgctcggtaatccgtttccccactgcaaccggcacatttggcaaataaatcgccagctcctctcctccccagcgggcaccgacatcatgctttcggatgttgcttttaatcactgaagcgacttgaattaaaatctcgtccccagtctgatggccgtacgtatcatttacatttttaaaattatcaatatcaacaagaataaaaacacccttttgatggattttcatgctgtattgaattttttcatctaaatacgctcgtgaatacagttcagtcagctgatctgttttcacgagatgctcaaggcggtcgcgaagcattgaattggttacagccagtgtcgcgtgatgaatcagcgcctgaaacagcttgtacatttcaaatgtaaaagcgtacagctcctgtttcaataaaaccgcaaagcctaaaagccggtcgttttgaatcatcggagcagccatcagcgagccgtaccccgccttcccaaaaacagactggccattcccgatgaaaacccctttttcaccttcatacagcttttctttcagctcattataaaaatctgacggcttcgcttctttaaaaaatgctgtgctgcctgggagcaatgttaggttttcaaaatggtctatatgaaaaaatcccacttcttctgcctgaaacgattctgccattctcacagccagatcattcattgtatcagtcaatgtcagccgctgattcaggcgtcgtgatgtttcattaatcaattccaaatttgcgatgcttgctttggattgttcgtagagctgggcattttcaaacgcttttcccgcggcgtttgctaacagcgacatttcatcaaggcaggcatcagtaagaaagctgtcacccgttccttcagccttcaacaccccgtatgtgccctgctgtcctttgatcggaatataggcgacagattcatttttccgcaaaatgtctccggacaaatacactttgagcgcaaaggaatcggatttttccccttccatatatagctcttttgcaggaatccctaaacattggtcttgatcgtgcgatataaataaagaaaactcaaaaagagaaaatgtgcttgtcaagctttctaaaagctgcttcagcacatctgtctgatcaagcagtgaatggaacagctctgtcattttgtatatctttttttggtagatcgttttgttatagagtctttcctgtttcatcgactggtttaaaaatgaagcaaccacgtccggaagcccttcaggaatctcttcatcctgcctgcatgcaagatggaaacgcctgccggagccgtcctcaatcagataacatgaagcgtttatttttgaagcggaaaaacgcgcttcaccatctgccagttttgtcacaaagtctgatggtgacggtgtaagcgaaacacacagggttgaaaaataggtttgaatagccgaagtcagccatatgaaagagtcggtgaatgtgactttttcagatttggttaataaaaaatcgagcatatgataatgaaaggcggataattgatctttagtttgttctaccatgtttttatcacctaaaagtttaccactaatttttgtttattatatcataaacggtaaagcaataatggaggaatggttgacttcaaaacaaataaattatataatgacctttgtgtgaaatattgcagcctttttgttcagcttctatgttttcattttgttccttatcaataaggtgtatcgtgtaactctctgctgctggagcgaggatacatgaaaacaaaatgtgcatggtcgaatagagcagacggtttttattttccacaaaaataaaaccaaaggaggagtcacattatggctcgctatacaggtccatcttggaaactgtcccgccgtctaggaatctctcttagcggtacaggaaaagaattagaaaaacgcccttacgctccaggtccacacggcccaggacaacgtaaaaaattatcagaatacggtttgcaattgcaagaaaagcaaaagcttcgtcacatgtacggtgtaaacgaacgtcaattccgcactttgtttgacaaagctggcaaactagctggtaaacacggtgaaaacttcatgattcttttagattctcgtcttgataacgttgtgtacaagctaggtttagcacgtactcgccgtcaagctcgccaattggttaaccacggtcacattcttgtagacggaagccgcgttgacatcccgtcttacctagtgaaacctggtcaaacaatcggtgttcgcgaaaaatcaagaaacctttctatcatcaaagaatctgttgaagtgaacaacttcgttcctgaataccttactttcgacgctgaaaagcttgaaggtactttcactcgtcttcctgagcgttctgaacttgctccggaaattaacgaagcgcttatcgttgagttctactctcgttaatcgttttaaaaacccctgccgctatgcggtcggggtttttttatcgtctgtttcgtcattcgcctcttgctggccaacactttcttgcgcctgctgctcccaatgatcccgctgcagccgttcttttgcaatcgtacacatgagattcacgctttagcgctcctttcatttaaaaggtggtgattggtcgtgtttgccctatctaatatactcttttcctttcattcctatgcggtaaacaaaaagatcctttgccttcagtggcaaaggatctttttcttatttatacgtcacaaggaagtattttttcttcccgcggcgcagaacagtaaattgatcttcgatgcggtcttcacctgatagggtataatttatttccgtctggcgttcaccgttaatgtaaacagctccgttttgaatgtcttcacgcgcttggcgtttagaaggagataatttagattgcaccaacacatctacaagtgaaagctcttgggtgctgtcaacttccatagaaggaacatctttaaagcctacttttacgtcttgagcagaaagctctttaatattgccgctgaacagcgcttgggagatgttgatggcttgctctagcgcctcgcgtccgtgaacaagtgatgtcacttcttccgccaggcgtttttgcgcttcacgtttttctggcgccgtttctgttttttcagcgtatgcttcaatttcctcttttgaaaggaacgtaaagtatttcaagtatttgacaacgtcacggtcgtctgtgttgatccagaattgatagaattcatatggcgatgttttttctttatcaagccagatcgcgccgccttccgtttttccgaacttcgtgccgtctgcttttgtgacaagcggaatcgttaggccgaacgcttttgctccttcttcttctgattttctgatcagttcaagacccgctgtgatattgccccactgatcgcttccgccgatttgcagtttacagtttttgtctctgtaaagatttaagaaatcataagattgaagaatcatgtagctaaattccgtgtacgagatgccggattcaattcttgagctgaccgtatcttttgccagcatgtaattgatgccgaaatttttaccaacgtcacgaaggaaatcgatcacattcattttgccgatccagtcaaagttgttcgcgatgacagctgggttttctgctgcttcaaaatctagaaatctggacagctggtttttgattttttgggaccattcggatacgatgtcagcagtgtttaatgtacgctctgctttttttccgcttggatcaccgatgaggcccgtcgcgccgcccacaagcgcaatcggatgatgccctgcaagctgaaaacggcgaagtgttaaaataggcagcaggtgtccgatatgcaagctgtctgctgtagggtcaaagcctgagtacaagcggattttttcttcattcagctgtttatttaacccttcttcatctgtcatttgctgaatcaatccgcggaaggataagtcttcaagtaagttagtcataagataaagctcctttttgattaaaataaaaaacgccccttcgtttacacgaagggacgattgattatcgcggtaccaccctactaataagagaatgcaaacattcgtcttatcactttgcctgataacggatcaggtccgttctttcactactgaaagcctggccggctttgtttgcaaaagcggttcatgagtgtattcgatatatccgtctgtgctgattttcaccggccatcagctctctggaacgtaaggatattctacttgtctcaatctttaccttttcatatgaagctatatcatttttaacataaataaaatcctgtgtcaacgccgccttttaatcctccattgttgacagatctccagccggcagattaagctcccatgccttcagcacgcgcctcatgatctttccgcttcgggttttcggaagcttatctttaaattcgatctcacgcggagccgcatgggctgcaagaccctgctttacaaataggcggatctcttctttcagtttatcagacggctcaaatccttccctgagtgcaataaaggctttaatgatttctccacgcaccgggtcaggctttccgattacgcctgcttctgcaatagccggatgttcgacaagcttgctttccacttcaaatgggccgacgcgctcaccggaggtcatgatgacgtcatcaactctgccttggaaccaaaagtatccctcttcatccatgtaagcagaatccccagacacataccagccgcccggcatgaaatacgattcatacttttcagggttattccaaatggtatgcatcatggaaggccagccctttttgatggcgagattgcccattcggtacggcggaagctcgttgccttgattgtcaacgatcgctgcctccactcctggaatcggcttacccattgaacccggtttaatatccatgcaaggatagttgcagataagctgactgcccgtttctgtcatccaccatgtatcatgaattcgtttgttaaaaactttatgtccccatctgatgacttccggatttagcggctcaccgacactgagcacatgccggagtgaagttagatcatatttcgcagccatttcatctcccgctcccatcagcatccgaaaagctgtcggcgcgctgtaccagacattgacgccaagctgttcaatcgtaccataccagctttccgggctgaaacgtccaccgacgatgacatttgtcgctccgttcagccacggtgcaaaaatgccgtataccgtacctgtcacccagcctggatcagccgtgcaccaataaatgtcttcttcctttaaatcaaggacccactttcctgtttgatattgctgaatcatcgcttcatggatatgcagcacgccctttggcgtaccagtggaacctgatgtatagtgaagcagaaagccgtcttttttatccatccattcgatatccagtcttgtgctttcctgtttcgctgcttcatcataattgatgatattcgtgccgctctcagcctctcccccgactacgaagacatgctgcaagtgaggcagtttgtctaccggtattctctccagcagctcaggtgttgtgacaacaacctttgcctcactgttttcaagccgatctttcaccgctccctccataaatgcttcgaacagcggcccggcgatggcgccaattttgattgcgccaagcataataaaataaagctcgggtgatctcggcataaaaataaaaacgcggtcccctttttccacatttccataccgtctcagcacattcccggctctgtttgattcttccttcatttctttaaatgtgtatttttcatcccgttttgcgtctttataataaagcgctactttgttttttcgaaacgattcggcatggcggtcaatcgcttcatacgccgcattcagtttccctgtctcatgccaagagaaatgtttctctgcctcggcccaatcaaaatgccggtacgtttcttcatagttttttaagttatgatccccctctattgctggtaacgctttcaaattcatgcccaaacatccccctttgctgaagttgtcacaattattatagtatatattcatattcttctcaatttttaaaatataaaccaggttgaaaacgctttataatttggtattcttaaagaaggcatgtatttttgataagaattgatgggacggtgaattagtggaacatcataaaacataccattcagcaaacatcaaaacagcaaccggctctttactgatagaagggcctgtctctccagaggatttggcaggttatgagtttcataaagatttaaccgcatttcgcccgcctcgcgagcagcatgaagcgctagtcgacattgcaggccttcccgaagggcgcattattattgccagagacggccgaaccattgtcggctatgtcacgtatttatatcctgacccgctcgaaagatggtctgaaggaaatatggaggatttgattgagctcggagccatcgaagtagcgccggactatcggggatgcgctgtcggaaagacgctcctgaccgtcagcatgatggatgaacaaatggaaaactacattgtgatgacgacagaatattactggcattgggatttaaaagggatgaaaaaagatgtgtgggaatacagaaagatcatggaaaagatgatgaatgcaggcggattggtctggtttgcaacggatgagccggagatcagctcccaccctgcaaactgtctgatggcccgcattggaaaaaacgtcagccaagaatcaattgagcaatttgacaggctccgtttttatcatcgttatatgtattaactgacactgacaaaggggaaaaaataatgattgttgagcaaatcatgaaaagagatgtcattacattaacgaagacagatacgcttgaaacagccatatgcaaactgaaggaattccatatcagacatctgcctgttgtagatgaagaacgacacgtgatcggcatgattacagacagagacatgaaacaggccagcccgagtatttttgaagaaaacaaacgaagcctatttctcacacgaagcgtagattcaattatgaaaaaggatgttgtctgcgcccacccgttagattttgtcgaagaaatatcagccgtgttctacgagcatggcatcggctgccttccagtggtgcaccatcaaaaattaataggcattttaacaaaaaccgatttgctgcggacgtttgtcaaattgacaggcgctgaccagccgggatcgcaaattgagataaaagtaaacgacatcaccaaaagcctcgctgagatcagcagtctttgccaagaccttcaagtgaaaatattaagcgtgcttgtttatccgcatgacgatcccggtgtaaaagtgcttgtcttccgtgtaaaaacgatgaatccgctgccgtttttgcaggcattacaaagaaatggacaccacgtcgtatggccgtcagagcaaagggatctgctatgagagacagtgtatttatctattctccatcctaccaaacctatatgtttcatcaggagcatccctttaatcagcagcgggttctgttaacatatgatttgcttaagacgatcaatgcctttgatgatggagacattgtcacccccagactcgcttcagaagaggagctttcccttgtccacacggacgattacattcaggccgtaaagcttgcgggcgccggaaagcttcccgctgaagaaggagaaagctacgggctcggcactgaagacacacccgtctttgccggcatgcacgaagcggcatcactcttggtcggcggcactttaacggccgcagactgggtcatgtcaggacaagccctgcatgcggcaaaccttggcggagggcttcatcacggctttcgcgggagagcatcaggattctgcatatacaacgacagcgctgtggctattcaatatatccagaaaaaatatagcgccagagtgctttatattgatacggacgcccaccacggggacggtgtgcaatttacattttacgataatcctgacgtatgcacgctgtccattcatgaaacaggaaggtatttattccctggaaccggccagatccaagaaaaaggcagcggaaaaggatatggctattcctttaatattccgattgacgcttttacagaggatgattcttttcttgaggcttaccggacagcagcttcagaagtcgccgcgtatttcgagcccgatgtcattatcagccaaaacggcgccgatgcccattactacgacccgctgacgcatttatcagcaacaatcaatatatacgaagaaatcccccgtcttgcacacactttggctcatcaatattgcggagggaaatggattgcagtcggaggcggcggatatgatatttggcgtgtcgttccccgcgcctgggccagaatatggcttgaaatgaagggaattgacccgggatacgagataccgccggaatggattgctaaatggcaaaaacaatgccccgtggcccttccgtcgagctggagcgatccggctgatttatatcctccgattccccgcaagcctgaaatcacagaaaaaaatgcccaaactgtcagcaaagcattatatgcgatacgctctgaacagcaaagaacaaagtaaaaaacgacctttacgaagaggtcgtttttgattttttgatcactatttccacacgccgattttccttcatgtgttcatttgtcttgttatccttcaccggctttgtatccgcataaccgacagcaataaagcgcttggagggaagcttctcttttgacgtgaagtattgaatcactccacttgcccgtgctgctgatagctcccaattcgacgggtatcggtatgtcgaaatgtttcggctgtctgtatgcccctccacctgaatgtcatttggaatggtttgaagaagaacggcaatttggtgaagaagtgtttcggcatttttcagcacctttgcctcacctgtatcaaacagcacagcctcctgaagaacgagcacgacaccgcgttcatcccgtttggctgtcatttgggccttcaaatgattgtcttttatatatgtatttactttcttgagaagctgatcctgctgatcctcttgcttcttcgtatcagatggggatgtattctttttttctatggatgtttggtccggctgaagcccgttgccttccttctggatcgagtccactgcagctttgaatttttgcagatcgatttgggacatcgaaaagagtaaaataaagaacacaaggatcaaggtgatcagatctgtaaaggttaccatccagctggatgaagattgactgttttttccgcttccattccttctgtcaaaacgttctcttctaagcttcatgtacagatcccttttttgtttttacttgttttggctgcttcttccattcttcccgtgagctgaaaacgaccagctggctttcaaggttgcgcgggttttttccggattgaacaccgataatcccttccaccattacctgcttgatgaaaatttcactttctgttttctcttcaagcttagccgcgatcgggttgaagaccatatttgccagtaatgaaccatataaagtcgtcagaagcgcaatggccatgtttggtccgagcatatgcgggtcgtttaagtttttgagcatcagcacaagcccgacgagtgttccgatcattccccatgccggagcgaattctcccgctttttcaaaaactcgccgcccttttcggtgccgttcctccattgctgcgatttctgaatccatgacgagccgaatcgtttcttcatcccagccgtcaatcgctaaaagcagcccttttttcaagaatggatctttgatttcccgagcctgatcatccaatgataaaagcccgtgttttcgcgcgtgatcggaaagggaaacaaaggttttcacaagatctttcacattgtcttcctggcggatgaatgcctgctttaacacagagggcgcttttttcagctctcttggcggaaaactgataaaaacagcggcgcaaagtccccctgttacgatgaagaaagaggtcagatcaagaaaagagcggaaaccgcttactcccgatcctgaaataatcccgataacaataataatcgttcctaacacaaatccaacaggtgtaagataatcaaaacgtttcatcatttctccccatgaaaaaagcaagaattcaccataaaggtgaagcttgctctttgtttttcttatgacttggttgactttctaagctctatacggtgcggcagttcgacgatatgctcttcaaccggctctttattcatgagcttcgtcagcagtctcatcgcaacggcgccgatatcatatgtcggctgaacaactgttgaaagctgaggacgaaccatgaggcttaatcttgtattatcaaaaccgataatgtcgagatcctccggaatggataagccctgatcctgagcggcatggataatgccgagtgccatttcatcagttgcagaaagaatggctgtcggttttttatccaggctcatcagatgctgcagtgcttcgagtccggaatcatatgtgtaatccccttcagctacaaattgttcattaaacggaaggttcgcttcttcaagcgcacgtttgtagccttggagttttttcgaacggttgatcggttctgccattggtccggaaacgaacgcgatgtctgtatgtcctttatcaaccaaaagcttcacggcatcataaatcgcctgttcgtaatcgatagcgactgacggtgtttcctcctgctcttctacagaagcggcaagtacaatcggcactggagaacgcttaaattccgccacatgctcgtccgtaatgtttccgcccataaacacgatgccgtccacttgtttgccgagcattgtgtttaacaagtgcagctctttctccatgttttggtcagagttgctcaaaataatattgtatttatacattgtcgcgatatcttcaattccgcgcgcaagctctgaatagaaaatgcttgagatatcgggaatgatgacacctacagttgttgtttttttacttgccagtcctcttgccaccgcgtttggacggtaaccgagacgttcaatggcttccaagacttttttcctcgttgtcggttttacattcgggttgccgttcacgacacgggaaacggttgccatgcttacattagcttctctcgctacatcgtagatcgtaatattgctcatcctaaaaccactccttttactggatacacttatccttatctatagcataaacactttatgtagagaaatgtcataatgtccgaatttatgtcgtttatgatttgtaagcgtaagtcagtagtgtacattatttttcattattcatcaaatttaattacttctcatgaaattatacacgtttttatagatgatgaaaacgtatacttggtttttataactaaataaacgagaaagcataaaaaaaggccgcaggcgcggccttttggattgttcaattaagcgttgactttcaccattggcttcagttcattcagccatttttcgaattcaggaatcgccatttgctgagcagagtcagaaagtgcgactgacggatcagggtgaacctcagccattacgccatctgcaccaatcgctaaagcggctttagctgtcggaagcaagaggtcacggcggcctgttgaatgcgtaacatcaacaaagactggcaaatgcgtttcttgtttcaaaatcggcacagctgaaatatccagcgtgtttctcgttgctgtttcatatgttctgattccgcgctcacaaaggataatttggtcattcccttgtgacatgatgtattcagcagcattgatgaattcagagatcgttgcagcaagaccgcgcttcagaagcactggctttttcacggcgccggccgctttcagcaattcgaagttctgcatgttgcgcgctccgatttgaatgacatcaatgtagtccagcgcttcttcgatatgagccggagttacgatttcactgataaccgccagatcaaattcatccgctacacgttttaaaatttgaaggccttcaacaccaagcccttggaaatcgtatgggctcgtacgaggcttaaaggctccaccgcgcaaaattttaatcccttgttttttcgcagctgcagcgacttcagctacctgctcatagctctctactgcacatgggccgacaatgaatctttgctggccgtctccgattttttcgcctttgatatcaacaattgtatcttcaggttttttcttgcgggagacaagcagcgctttgctgtgatcttcttcctgaagctctaaaccggctttgaatatctctttaaaaatgtgctggatggttgaattttcgaacggcccgtcattgttttcaatgatattgtttaacattgtgcgttctctgacagggtcaaatcggttgacgccctgtgcttccttcgctttaccgatctcttttacaacatttccgcgttcgttgattagttttaaaatttgtaggtttaattcgtctgctttctgccttaaaagctctaactctgtgttgctcatttttttcatcctttccctgcacattcattttttattttgtagttatcatgcatcttactataagtaattccaaatggaaatactgaaatacaaaaaattttataaaaactctactttattacccaaacgcttttaagtgataaagtaatctatgaagctatcctacatgatgtgagggcaatgttcaagggttttttacaaaaaaaagcgccagatgatatctggacgcttttttctatgacaaatgctgctcaatagcggcttctgtaatttgtgaatgtgaggtatgccatttcacttcaccgttctggatgatgaatacctgagggctttcatgcttgaccccatatgtttctgcaatgaaattggacagcggccgggcttcttgtacttgaagatagtaagccggcacatcctcatgctgatttgcaaaggcatcaaactcatgaaatgctgcctggctgatcgggcatgtggtgctgtgtttaaagaagacgaaaacgccttcctgttctgcaatccgtttaaattcttcctcagattgaataagctgtttagccatgactcaagctcttccttccctgctcagcgattcaactgctcagcctgtttttgtgcatctttcagttcgtcttttacatcttctttcgtctggaggacttgatcttttgtttcatcagccgcctgcatcgcttcttccctcatatcctgcattgcagtcgatgaatccgttttgtcagatttggaacggtctctcaaatcctttaccttgttcatgatctgtccagactgatcggctacaagctgtgtgatgttggaagttttgtcttttgcgatgctgacatattgcgtgcctttttccttcgcatctgccgtcattttatcagttttgtcccgtaaggcaacagcctggctgccgagatcgtcgcgaagttctttgcctgatttaggtgctagaaaaagagctgtagtggcaccgatgattcccccgattaaagttccgattaaaaaatctttactattaattccatctttgctcatcattattcctcctcttagtatttttttctcttacagggctgattttttcttttgcttccatttctcccaaatttccattgctgcttgactccaagtgacaacttgattgatcttatcttgattttctctaactgatgccgatacagaccctgccgcttgtttcatggatgtattgaactgctgtacagaagctcccactccttgaacagcatgaacgaccgtgttcagcttttctgatttttcctgaatatcttcagccaggcggttggtcttatgtaaaagctcggctgtttcagttgtgatgcccttcatttgtccctccagcccttcaagagtggatgcgacgttttttagtgtcagctgcaatgacttcagtgttttagacaagtagatcactaatacgagaaatgcaactgcgatgagtgcaacgctcaaataaagaataataatcatctcaaacctccttgctgcaggatatactgctgtttacccgttttcttcaatcataaacatgtgtactgggctgtatacatactattctccgttatgtaagaaaatcctttaataagcttttccatcagataaataaaaagcagtgagatcactgctttttattatgccatgacgttttcgtaggctctcatatatttttggatatctcctgctcccatgaagatgagaacggctttatcatgagcttttaaaacagatgtgtcatcttcttcaatcagcttggcattatgaatttttccctggagatcgccgatcgtcagctttccggcattctcacgggctgagccgaaaatatcgcataaatacacacagtcggcgccgctcaggctttctgcaaattcgtcaaggaactgctgcgtccgtgtaaatgtatgaggctggaataccgcgacaatttcccgatcaggatacttctgtcttgccgcctcgattgtcacttttatttctgtcggatgatgggcatagtcatcaatcagcacttgatccccaagctgcttctcattgaatctgcgtttgacgcccccaaaggatttgagagcatgcttaatgatgctggaatcaatttcttcataatggcataacgcaatgaccgccaatgagtttaatacattgtggtggccgtacgcaggaatataaaacgtatcatagaacgtattgcggacaaagacatcaaaagttgtcccttccgtgctttttacgatgtttctcgcttgaaaatcattttcttcccccgtgccataatacacaaccgggacgttcgcatggattttcggcagatgctcgtcgtctccgcaggcaataatgcctttgttgacttgaagagccatctcttggaaagcgtcaaatacatcgtcaatgcttgagaagtaatcagggtgatcaaaatcaatattcgtcataatcgcgtaatctggctgatagcttaagaaatggcggcggtattcgcacgcttcaaacacaaagtattcgctgttttcatttccctggcctgttccgtctccgattaagaaagacgtcggttttgcgttttggatcacgtgagccagcagacccgtagtcgacgttttgccgtgtgcgcccgtaacggcaacactcgtgaattttttcatgtagtcgcctaaaaacttatgataacgtatcaccggaattccctcagacatcgctttttctatttcaggatgcgtgtctgggaatgcgtttccggcgatgactgtcatgccgggtttaatattctccgcgctaaaaggaagaaccgtaatatttcttttttcaagcgctgtttgcgtaaaaataaatttttcgatatccgatccttggacagtatatccattatcatgaagtatttgggcaagcggactcataccggtcccttttattccaacaaaatgataaacagtcataattgtacctccaacaaacgtctatctgttccccagtatatgacgctcatttcaatttgcgaccgcggcggctgaaaagcctcccttagcggcgtattttatatgttttgttatgtttagtatcaggttatttctttccgattaaacccagatatcaagatttgtctatgcacagctgctgtaaagcggcatagctgttaaatgctctaaacactatcataccatgtttggtgtgaaaatgaacccatattattcgtttattaaatcacttgctgtgatcagcacctcccgaggcttgcttccttttgcctcagagatcatgccttccgcttccatcatgtcgatcagccttgccgcacgattgtaaccgattctgaatcttctttgcaggcttgaagtgctcgcactgttttgctctacaacaaactcacacgcttcgtaaaacagttcgtcctcttctttcagggcagatccttgtcttacgagctcttcttgttcaaataaataggtcggcggcatttggcttctgacgtgggaaacgacgcggtcgatttcccggtctgacacaaagttaccttgcagacgaaccggttttcccgatccgttttccaaaaagagcatatccccttttccgagaagcttttctgcaccggctatgtcgataattgttcgggaatcaacctggcttgaaacagaaaaggcgattctcgttgggatattcgccttaatcagacctgtaatgacatcgactgacggacgctgagttgcgacgagaagatggataccgcacgctctggctttttgggcgatccgcgcaatgctttcttccacatcgtttggagccaccatcatcaaatctgcaagctcatcaataatgacaactaaatatggcagcttttcacccatttggtgttcagcggttaattgattaaagcggtcaatatcgcggacacctgaatgggcaaaaagctcatagcggcgctccatttcctcaacgacccatttcaaagcagctgtagccgctttggcgtcagtaatgaccgggctgacgaggtgaggaattttattgtaaggggccagctctaccattttcggatcaatcagcagcacctttacctcactcgggtcagctttataaagcaggctgactaatattgtattgatgcatacgctttttccggagcctgtagcaccggcaatcaagccatgcggcattttcttcaagtcgataacaacaggatttcctgaaatatctaatcccagcgcagctgtgagcggtgacttgcttgtcctgaaagctgagctgcgaatcatttggcgcaaatcaaccaccttgctcgtgcggttcggcacttcaattccgatcgtgtttttccccggaatcggcgcttcaatccgaatatctctcgctgagagactgagtttaatatcatcggacaagttggtgattttattcacctttacacctggttcaggatgcacttcaaatctcgtgacagacggaccctgggttacatggaccacattggcgcggacattgaagtttttcaaggttaaatcaagaagctgacgctgttcttcgatccacgcagtatcatcttgaacctgcgctggcgggacatcaagcagtgcaacattcggaaatacatagctgccgcggcgctcctctgctttttgctgtttatgcgtatctcttttcagcatcatcacattaaaaggaacggatggccctttttgagaagatgcgctttgttcagtccttttctcctgtacaccaggcctttttttcggctcttctgaagcttcgcgaggtttgtctgcgcgaattccctgccggttttcaagagttgcagtaaacgatttggaaccctgctccatgtgttcagttttctcaagctctgtatggctgtctggctgaacatctatcttcgtttcctgagcctctcccaggatgtcataatgattatttattatgctgtctgatggctcttctgattcttttgccacagtttctgcttgagccagagcctctgatgaatactcatgatcagtaaataaaggctcttcctgacgaatgtccatttgttcttcttgaacgaacggggactcagcaccttcttccgcgttttcatgatgattgtatactgggctgtctgacggctcttttgctttttcatcctcagatattgcctctgtctgagattcaggagctgtttgctcttcatcaagttcagcggagaaaacaggctcttcaaatttctctggctgctgctccctttgttcttcctcagccgttgcaggctcttcgcggcctacttcactgtctgaaagcccttcagccgccgtatctgtgagcatctcaggcggtgtttgctcttcggcatgttcagctgggaaggaaggctcctcttcttccggctgttgaacgcctgactcaaatggcactttgttacctgacggctcggctggccttttcgccagcgcctcatcattctccgtatcctttctgtttaaaacgccagaaggctgtttttcaaattgggtatccgggaagaaaggactttcttttttggaatgcgcctgtgtgtctgaagcaggatagccgcgttcacgttcgatctcttctgacagcagtgttaccttctcttttaccgatttatccggttcgttcaatgtttcagaaggctttttcggcacatcctttttaacagatggtttttgattgaatccatagacaggcgaagggatatttgtcggtttaaacggtttcttcgccggctctgctgcttgatatgtatgctgctcttcttcatttctgggacgctctctgtaaggtgcagcacttggacgaggcgcggatttcggttcgtccgatggtgtgcggcgccttctcaggtcatgatttttgtatccgtcaggcacgactggaaaacggaatttgccttttggatattcataatatattttaggatcttccaatctttttaattgtccttcaggatgatgtacttcttgttgctgcggaatttgagcgggttttgtctcccgttcagcatcctcttcgctttcgcctaaaaacaaatcaaaaaatttatgaagccaactcataatttatctctaactcccttatagttttctgggacggtttttagtataccactgctggtcggcccagaaaagattaagctatcagcagaaacaaagccgctaaacaagggcttagcggcttttcacatgattcgttttttttggcggatttatgggagtctaaaaccgaaatgcgtctcctgcctcatagtctccttctaacacaaggattcctttttcagcaggggcatccggcaaatcaagctctttcgctgagcagatcatcccgcttgacggaacgccgcgaagctctgcatccttaatgacaagtccgctaggcatcacagcaccgactttggcaacgacaactttttggccttggtcaacgttaggcgcgccgcagacgatctgaagcgtttcttctcctacgttgactttacatacgcttaatttatccgcattcggatgtttttcttttgattctacataccccacaacaaacttcggagataaatcaacgactaatgtttcttcaacgccgtttctgtttaaaatctcattcacatcttgcacgaatgtttctgagagcgcaacagggccgttttcatcaatagtcaagtaagaagacgcgttgaaaatgttgaagcccgttgtttcttttgtttcgttattgaaaattttgacgacgtcgccgtgtttttcatagcctaattgttcgcgtgtcacatcttgaagagagatcaggagcgtgtctcccacaccttctttattataaaaagcgttcataagtaaaaatcctttctaatcctttttcggacggcttttcgccaggataaacaccggttccagctttccttcattgtacaaaaatgaaagggcggtaatcgggacggtgccgcctgcaaagaagctcatcgacatttgtcctagaatatcataccccgattcattccggatgtcagcaagaatcaaaacgtcctgatgaggaacagagatcgccagctccccttctgcatgctgcttatactcatttaagatcgcttcgttcaaaatccggcttgcgtcgtatccgtcgtttgccctgaagaaataaaagtaattgccggcaaccgtatcttctttgacaaccgtcggcagggaacggagattaaatgcggccgtctctctgatccgctcttttgtccagttttctttctcaagcatgcgctggtcaattaaacggtaggttttcccgagatcaagcgcgtaataaattcttgtctctgcggtatgatcgtcataaatgagcgggatatcttcactggacttgtccgggaaggaagtcgagcggatgaccggataaatgcgagtttctttcccggtcatttcctgagccttcccttccattgccgtcatcgcttcagagacatagtacacgatctcatcaatggcttcgtcttttttcagttcccattttgcaataatcggcggcaaatcgagtgtaatcccttttttagtcgtttgatcctcaacacggagggtgtctttttctctgtcaaacagaaaggagcgattctcgtgctgaaggcgctgtttcagtatatctgacagcttccttgaggtcattttcaaaccgatgtcctcctttacgctttagcgagagagtctgttaaaaactgttcaatttcttcttttgttttgcggtctttgctcacaaaacgatttacttcttttccttcattaaacaccacaaagcttgggattccgtaaatttcccactctgcacatgtatcaatgaatttgtcacggtctacgtagtagtaggtgaattcagggaaattcgcttccaattcaggcaggaaaggctctacaaaacggcaatccgggcaccaatcggctgaaaacataaatacagaccaatcatcctttaccgctttttccagctcttgagttgattcaatttttttcatttcatatccctccagttgtttatgttcttacatgttttttatcgatactcgtccatttggatcataccaaactgcttgaggcaaaaccacttatatgcaacgaatgaatatgtaagattggctttcccattatcattatcatattttatttgcattatcaagctcgtttcgtttaacatcgtgtacatgagggtaaaatttacagatggacatacataaggagggatttttatatggagtttatcgtctatttagcaggagaaatccacagcaattggcgcgaggaaattaaagaaaaaacaaaatcactgaagctccctattacgtttgttggcccgatggagaatcatgaccgctcagacaatattggtgaagaaattatgggcgtacagccaaatgccgttttaaaggatgacaaagcctctgacatcaacaacttcagaaccgccgtcctgatgaataaagcagactttgtgatcgccctgtttggcgaaaagtacaaacagtggaacacggcaatggatgcatcatatgcgatcgcaaaaggaaaacccctgattatcatccggccagaatcgctccaccatcctttaaaagagctttccaataaagcgaatattacggttgaaaccgttaaccaagctattaaggccctttcctatctatttgaaacagaataagaaaaaagcttgtcgatccgggcttactgctcgttcaacaagcttttatgaaacctacatattttctttaatcgcatccaccgtctgcttatcgcaggctgttacaagtttgatgagcatttctttagcagcagcataatcatcaatatgaatgatagaagcgtttgtatgaatatagcgggaacatattccgataaccgctgacggcacaccgctgttcgaaatatgaaccttgcctgcgtctgttcccccgccggatacaaaatattgatatggaatatcatgcgtttcagccatatcaagaacgaattccctcattccgcgatgcatgactgtcgttctgtcaagaatgcgcagcaaaaagccttttccaagctggccgaattcatttttgtctccgctcatatcgtttgccgggctggcgtcaagggcgaaaaacaagtccggtttaatcatatgagaagccgtctgcgcgccccttagccctacttcttcctgaaccgttgcacccgcatagagtgtattcggaagctctttaccgtgtaattccttcagaagttcaatgcttaagccgcatccatatctgttatcccatgcttttgataaaattttcttttcattcgccatcgtcgtaaacggacaaacaggcacgatctgctgtcccggtttaatgccgattttgatggcgtcttccttatcatccgctccaatgtcgatcatcatgttcttgatatccatcggacggtttcgctgcgcatctgtcaataaatgcggcggtatgcttgaaatcacacccggaaccggcccgttatctgtttgaatttcaacccgctgcgcaagcaaaacctggctccaccagcctccgagcgtctggaatctgagcagcccgttgtctgtaatggatgtcaccatgaagccgacttcgtccatgtgcccggctaccataattctcggtgcgtcctctgcgcctcgtctgactccgaaaacacttcccagtctgtcctgaacgatgtcatcggcatatttggctagctcctgcttcataaaagcacgaacctgatgctcattgcccggcgcgccgggaagctgcgtcagtgtttggaaaagcgctttcgtttcttgattcatgttttcccctcatttctatgtagtccttttattttattagaaacaatgaagttttccaagcaccctgacccaatctgctcgatcagccgcgtattgcttaacaggatttggctgtttctgtataatgaaaagtacgatcaaccaggaggtgctttattttgaaattgcgtcatcttcttttaggagcaggacttggaatttgtacggctgtcgttgtgaaacaatatgtgatgaagccttatatttcttcagaaaaagcgcttcgaattgtaaagtctgcttttaagcagcggggcccgattgacggatcatggatttacacccagccggagccttacaatattaacggagaaacggtacaggtatacaaaaccggcattacacgatcagctttcggagaattagaacagtatgaagtcatggtggatgcgaaaacgggagaaattgttgatgtcattgatacaatcgcctcttaacaccggacaagcaaaaaatagaagccgctgcctacgcagcggctcttttttattatatcgcgcgaatcggtttgtataccggataccacatcgcatcctgcactgcctgtataatgtcttcaggctcttccgtagcgacgccttccttcattgcggtttttgcaacttcaacagcaacggttgccgaaacagtgcgcaaatcttcaacttttggaagcatcggcgcgccaggcaccccgacattgaccatacctgcgattgcccgggcacatgcttcaaacatgccgtcggtaattaattttgatttggtaacaatcgttccaagaccgagaccagggaagacaagcgcgttgtttgcctgcccgatatgatacgtaactccgttatattcaactggcgggaacgggcttcctgtcgtgatcagcgcacggccttctgtccattcgattaaatcctccggttttgcttcagaaagagttgtcggatttgacattggcaaaatcgccggccgtttcacatgtgacgccatttcttttacaatttcttcagtgaaagcgccggaaaccgtagatgtgccgatcaggatcgtgggtttcgcctgccggaccacttcaagaagatcaatgcctccgccgtctccgttccgctgataatccttcacttcttcagccgaacgagcatacggcttttggaaatcaagaagctgatccatatcatctgttaacagcccgtttctgtctatgcaccagaagcgcttgtatgattcttcttcactcagtccctcgcgcaccaatgcttcccgcagctgttcggcaattccgattcctgccgttcccgctccgaatataacaactctgtgatccctcagcggaactttagacgcttttgcacaggataagactgcggccaaagaaacagcgccagttccttggatatcatcattgaaggtacacactttatctttatagcgtttcaaaatgcttcgcgcgtttttcgccccgaaatcctcccaatgcagcaatgcattcggaaatgtttctctcgccagcgcaacgtagtcgtcaataaattggtcatagcgttcgccgcgcactctggaatgctggttgccgacataaagcgggtcgttcaagaggctctcctgatttgtccccgcatctaaaacaactgccagcactctgctcggatcaatgcccgcagccgctgtataaaccgccagcttgccaatagaaatcgcgattcctccgacgccccagtcaccgattcctaaaattccttccgcatcagtggcaacaattaaatcgatcgtatcgctttgatctttatactgtttaaatgcttctttcataccgtccgggtcatcgattgacagatagagccctcgtggttttctgtattcatggctgtatctctggattgccgttccaactgtcggtgtatagacaatcgggagcatttcccctaaatggtcatttaacaggcggtaaaacagcgtttcattccgatcgtgcagcgccgttaaatagacatttttgctcaaatcgtcaggctgtgcggaatattgttcatacgctcttttcgcctgatcatcaattgttaataccttgggcggcagaaagccttttaaaccaagttcttttctttcttcctcagtaaaagcaacacctttgttcaaaaaaggaacagagagcacttcaaggcctcttaatgttgtttgaatgtctccttcgtttgttactctgaattgtttcaccctgcctcttcctttctgagcataattagtactaggtttgcattattagccggaaaacatgcagggtaaacataaaaatatgctatcgcttcattcgcttaactgactttttgatacttccgtcctcctcccattgaagggcgcgatactcggcatcatggtaaaaaataaaccaagcatctttttctgctgcgaacgcctgccatttctgcttttgcgggatagaggtcatcggataatcatcgtaagccagcacccatagcggattgcggtgggcatgtgtcggcatcagatctgccatatgtacggcagtttcacccgcatcctcgcatatcaggacactgtgtccgtcgctatggcctccggtgtgatgcattgtaataccctctgtgatcgttaaggtgtcttcaaaggttttgacttggccagctacagcctcccaattttctttccaatacgtatttttcgacctgatattcggatggcgcatttcgtcccattcaacagctgatgtataaatcactgcattcggaaagacagagacgagccgttcaccttcatattccgttaaaccgcatgcatgatcaaaatgaaggtgtgtcattgcgatcacatctatatcggcaaccgttaatccgagtgcagctaatgagggtttcacattcgactcttgtgtcacgccatagtttcgtttttgtttatcagtcagcttgccgtacccaattccggcgtcaacgatgatattgagcccatccttttgaatcaaaatagggtctgtccttagttcaatctggtttttttcattgactggatattttttagaccaaagcggctttggaacgacgccgaacatggcacctccgtccatatgcgtcacgcccccgtcaagccaggtcaacgtgatattaccaattttcattgtttccattttcatcccccctgtcatcatggtagcaaacggcccataaaaaaaacagactcctgtcagagtctgtctttacgttctccattcaacctcagcccgatagatcggctggccgagtgcagagaatttttcttcatattctgtcataatattgccttccagattgctgttatgcaaatcgaggctgacgtatgtcagcagcaggccgtactcagagaagctcttcaaagagtactcaaataaacctcggttgtccgttttaaaatgaatcgatccgcctttgcccattacttcttcatattttttgaggaagtgggaatatgtcaagcggcgtttttcatgccgtttcttcggccaaggatcagaaaagttcaagtagacccgtttcacttcccccggctcaaacacatccgtcagcgtgtccgcatctatattcagaagctttacattctgcgcttcgctgtcttttactttttggacggctgtcacgatgacgcttttaaataactcaataccaatataattgatgtcgggattttgtttggccataccagaaataaattggccttttcctgtaccaacctcgatatggatcggattgtcgttgccaaacactgtgttccatttccctttataatcagcaggattgctgatggcaatatctgcgttttcagccaaaaagtcatcagcccaaggcttgtggcgcattctcatatgattgacacctctatctattatttcgactaacaacataccatgaattaaaaagacccgcaagctcgtttttccagtgtatctctcttaaggccgagcgcataaaaaaagagggtcccgtctgctggaacactcctttcacatgtataaaaacgctctgttttgaacaatttaacccgtatgatactgaagggatgtgtaccgttatgggtttacattatgagcatcaagttcatttattgaaggatatcttgactgaccatcaattggactgctgcggaacagtcgcagagtacgagcagcttgagcgtgtgattaaatcactgatggcaaacaccgagcttgattcaaatttcaaaaacgtgcttgaagatgtttaccgctacagccaatcaggaatatcgtccaaatccattgactcacacatacaagagcatcagaacagcctgtctcaatgggtagagcaaatggattcgtattcctgattaatcaacaattcgtttcatgaggatatgcagctcttccattgcatcatgaaattccttatcattgccttttgctttatgccaggcaatgaaagtaattgtttcagataacacataccaagccattcgcaaccgaaggctttctgtcagctctatgccgtacatgctcagccagctctcccaagctggcttttcgacgtagtggtacagcaaaggcccgaggtccatcgccggatcagcgatcatggcgccgtcccagtcaattaaatacagctggttgtcttcagacaatagccagttattatgattgacatcacaatggcaaacgactttctcaccgaaatgcacttcatgcaggtgttcttccaaatacttgatcccttcttgaatcagcggcgaagattgctgcacagcaaatacagcctgcttcagctgagacaaaagagcccccgggttcagcggttcttttccaagtctcttcagcatgtccagcaaggcttttgatgtgtgtattttacgaagcaattcagcaacgggccgtccgctcatgtctttaggcttcagctctctgccggtcatccagtgctgggccgtaatgacgtccccattttccatccgttttgtccaaaccagcttcggaacaatgccttcggcggataaaacagctaaaaaaggtgagctattacgttttaaaaaaagctgctgcccgttatgtttcgcataatatgcatctcctgtagctcctccggcggggaagatctcccaatcgctacctagtaattgtcccaaccagttcatatcaatgttcaacccatcatttcttaaaatattttagaattaaggctaatcgtttctagtctatccagcgaatgcctttttcgtacgaatcgtataaaaataaaaaagacagctattgagagtctcatatgctaatcaatagccgtcctttaaattttagcgctatagcacaaacttcgtcaagcaaaactcttaagatctgatgctaaatataagataaccgttccgatgccgtttactgcaaccgttttcttgatttctgccgggtcttcctgaaatcctgatggatcacataaaagccgataaggtatgtcgtttggcagcctccactcgacggagtctggactcgcgtgatggataacaatgatatctttccattcgtcaacctcgtcaagatcataaagcctgtatgcgataaggtgttcttttagcgtcaagcattcaagatggcgccggatgtctgcagcggacctaagacggaatgcaggatgcgcttttctcagcgagatcagcctgcggatatagtgaacatcttctttgaatgtttcgcggcgatcccagtcgagctggttgatgctgtcactggattgatagctgttttccactccctgcttcgtccggaaaaattcctgaccgctgtgaataaacggcaccccttgggcaagcaaaataatcgcggctgcaagcctttgcctgcttcgctttcggctgtcattttcttgaggaagcgcgaagctcattttatcccaaaaggtgtgattgtcgtgtgattcgacataattgatggactggcttggttccggaacaatcggtgctaatgccttccatccggaagacccggcaattccatgcatcacagcttgtgctgattcactgctgccgagcgcaaaccctgctgccttaaggtgaaaggtgttcccttttacagcgtcacgaaacatatcattaaaaaagccgatgcccggcattcttggcgcgttcgccaaagcagctttctgttcatgcggcagcggtgtagccagatcccacccttctccaaaaagcaggattccgggctttgccttagttgctttctctttcatataaagcacggtgtcaatatctaaaatcccgaggagatcaaagcggaagccgtcaacgttgtattcttcaagccaatagaccacgcaatccgcaatgaactttcttgccatccttctttctgatgcgatatcattgccaacgccggtgccgtttgatggcatcccacattcgtcgtgccggaaaaaataacctggcactgtcttttcaaagggggaattctccctcttatacacatggttaaaaacaacatccagaatgactcgcagaccgtgctgatgcagggtattgatcatttgtttcagctctgtttttctcgtttgaggatcatgagggtttgaggcatagcttccctccggggcaaagaaatgaagcgggttatatccccaattgtatgcatcaagcggcttctcttcatcaactccggcaaaatcgttcaccggctgcaactctacatgagtaacaccgagctcttttatatacgccagtcccgaagaactgccgtttgcggtttgtgtatccgtttccgtcagcgctaagtattttcccttgtttatcatgccgctgttttcatggatggagaagtcgcgaaggtgcgtctcatagatgacggcatccacagggtgtgagaatggtttaagaggagcagtccatttcatttgatccgggcgcaagacgacgcccttctctccatttacagtcacagccttggcatacgggtcaactgtttccatccattctaaattgttgcagatgcaaaacaaatactcatacccgtgaaggtcacccgtgaccgtaacagcatagacacccttttccaagcgattcatttggaatgtgcgcccgcttttattggggtgtgaaagcttgacagcagctgaggttgcagcaggcgcccatactttaaatacggtatgatccgcggtataaacggcgcccagctctccgtcataataaaattcgtcatcaaacgcagccgtccggatgaccgcgccaatttggagatccgttttgtggccgctggatgctctgacgcaatggatttttccaaatgtcacaggatggtcggatacgcagacgtacttgtattttgcttcaagggagtattcctccctgacagccagaggaaaaactgttgtttctgtctcaagccgaaacggcggtgtcatgatttccttttgttcagcaggaatcagaacagtaatgatattcatatcatcgacatacgcttcgaagctgcggcggatgctgaccatcggaagctctctcctccaaacacgtttatgttttgatccttaggggtgaaggactagatgccagacgaaacggggtagtgcccatgatttctccgtcagcatggaacgggattttgtccttcgtgtaaaatgtaatgtccttcgctttaaacatcgtaacgccatccatctttgtatgttttccaaatgccatgagacataaaagccaatattttttcaaaaacggctggttttcaacgattacgatatcaaatgtcttctcgcgcggatttgctaggggcgccgccttcatgcctcccccgtaaaacggatggttggatacaacggcaaaccagacatcatgaaattcgcgcgtctcgtcttccgtcgtacaagctaacgtaaacggcttaaaggttgccgaagcgtgcaaatgagaaagcggatacacaagaaatcgaaggcggagaaaaagaaaaacccgtctcaacggaaattccatcgcctttttattgacatatgcgtcaaacccgatcccgatgtgattcataaaataaagaatctgtgatttatcctgaaggaaattgacgctccctaaatgaaaggttcttgttaacgggcgctttaccttcttgatttcctgtatcagatcgatttttttaatagagaaccctcgcgaaaaatcattatacgcgcccgccggcacaaagctcagctcaatatcgtcaacatctttcagcccgttgacaacttcatgcatggttccgtctccgccaatgacgatcaggcgcttcagcttatattcctgtatcgttgaaatctgtctggcgagcacctcggcgtgtcccggatgttcagttaaaaatgaacggtgctcaacctttcgtttgatcaattctttttgaatggacttccaaacacgcaggccgtttcgatgtcctgctgtcggattaataataaaaaaccaatggctcatctttctcacctgcttatgttatgagaaaaccgctcaaatcgttctcttttactccagccactcctgtctgcgataggagtcagacatgcagtaagacaatagagcctttgcagcctttacctgatgatgtttgatcggagcagtgtttttcttctgccgctcaatccattcttccgcgctccgcttatccgctatttctaagccgtatggcggctccgggtaatcgatgtacgacgttctgctcagaagcaattttcgaaccggaatctcagcctgtttttcctttacgatctttgacacaaccgagtccgtacgaaacaggctaagccctggatttaacactgatgcagtctgagaggctgttttcttgtcccaaaaacgatttttagaccctatgtagacactgtcttcctcagcctctaaaaaagaaacgcaataaatttccagaggagaaataatcacaatgcttaattcaaccgccgcctgctgaattttcagcacaggcttatacataataaaataagaatcaggcagctgctgggtcagataacgcaaaatgcggtcctgcttcacttggtttgagagttgagatatttctgaaagagtagagcttgcccatttgagctgaaaatcatataaatgccttttataaaaagaagcaagcgccaccctgctcttcgggagccttacatgaatatcttcttcgtcctcaaaccattggtgtctctcttcttgtatatcggcttttatctcttcttttcttcttttcaatgaaaatttttttcgtttctgcaccggttccggttcttcagcactggcttgcctttcttcatgctggcgctccgctgcttctactagtgaaagccagcgctcttttttcaaacgtacaaactggttgatataatggtacggatcaagctcatatctcgatatataatcatgaattttgatgatttgtgccatgtttgtttctccactccgcaatgaattaagataattgaaatttgaatatttcctcgtattttggtgattggttcaagtgtatttgaaagagcgaaaatcgttcagccatcatcgaaacctcgccgctttcaaacggaacatgagctggaaatccattttcgcctgtccattttcttgccagcgtcatatgaggatgatacggtcttttttccacttgaaagccggcctgaaggacagcctgcttcgtatgttcccgcagtctatcaagcgttttgtttttctttggctccagatgtaaaacgcgcggccttctgcggtcgccgaatacatctatcttgtcaaactcaattgaaaatgggtcaatttctgaagcaatctctgctagcgaaccttcaagcttctttatttgtgtctcatccgccgctccgagaaaaattaacgtgatatgatagtcaagcgggtgcacccatttttgaaacgtcaataccggttcgtttttcgcagcctggtagatcggatttgcaattccctcaggtatgggaacgccgatgaaataatgaggccgtatatctggcatccgtctgacactcccttctttgacagctattattttatcaataaagaggctgtgcggatagaggaacagtgtatgaaaacactctcgcacaaacgtttattatgttaggatattatatgacacttgttttattcagaaaggaatgacaatgttgaaaatcgttgcaaacacagctgatctgataggagatacaccgctagtgagattgaatcggcttcagccggaaaatgcggcacaagtctatttaaagcttgaatttttcaatccgagcggcagtgtgaaagacagagccgcttatcaaatgatcatagaagctgaacaaaacggtttactcaagccgggatcagttattatagagccgacaagcggaaataccggcatcgggctcgccatgaatgcggcagcacgcggatataaagcaatcttagtgatgcctgatacgatgacgaaggaacggatcaacctgcttaaagcttacggcgcagaggttgtattaactcccggagaggaaagaatgccgggcagcatcaaaaaagcgaaggagcttgccgaacaaattccgaacagctatattccaatgcagttcgataacactgccaatcctgatgcgcaccggaaaacaacagcgcctgaaatcgcccgggcaatagaggaaatcggaaaaccgctcggcgcttttgtcgcctcctctggaacgggcggaaccattaccggaacaggtgaggcgctcaaagagctttttccggatatcacggttcatgttgttgagccagcgggttcgcctgtattatccggcggaaaacctggcgcgcataaacttgtaggaacgagcccaggctttataccgccgattttaaatgaggacgtttatgatgaaattatcaaaatctctgatgaagacgcgtatacgacgacaagacggcttgctgctgaagaaggaattcttgtcggtccttcatcaggcgctgcctgcttcgcggcaatcgaaacagcgaaacgcctctctcctgacaaagttgtggtctgcatgacagctgatacaggagaacggtacttatcaactgatttatggtcatttatttaaaaaaaggactggcttcagcagaagccggtccttttattttgcaagctcgtaaatggcctgagcatataacgctgtcgatctcagcaggtcatcaatttcgatatattcatccttttggtgtgcgctgtcagggcgtccggggaacagcgggccgaacgcgacaccggcttttaaggatctcgcatatgtccccccgccgattgagattaagtcagcttttttacccagctggccttcataaaccttttgcagggttttgactaacggatgatctgcggacacgtgatgcggcttgctgtctttgaattctcccagatcaaattcagatgcactttcgaatgcatcgcgaatcgctttgctttctgctgtcacaggatagcggatattgatcccgagctcgcctccttgcccttctttatagcgcagtgtgccgacatttaatgtcagctcaccgctgatttcatcctcacagtcgatgtccagtttttttcctcttgtatcacctgagaacttatctgtcacaacttgcacaaaccgctttcctgcatcgtcaagctcagtctgctggagaaattcgcacaataaaatgccggcattgatcccattgttcggttccatcgcatggcaggaaagaccgtacatacgcaaaatgagctgaccgttctctattgcagcttcccctttttggtccgtcgtgcggagcatgtctttaaatgaagacagaatctcttcttttttcggcccttcaatgacagcttccgcagcgtcgggcaccatgtttaagcgaaggcctgattgaaacgagacaagcactgcctttggttctgcttgatttgggcggtgcggtataagtaaagaagcatcgatgatccctttttccgcattaatgattggaaaatcggcgtcaggcgcaaagcccattgttggcatttcttcatgcttgaaataatgctctacgcatctccaatcactttcttcatctgttccgataatcattctgactcgcttggacaggggcaaattcatgtctttcacgattttcagcgcgtagaatgccgccattgtcgggcctttgtcatcaatggcgccccttgcataaatccgtccgttgcggatttcagctgaaaatggatcactcgtccatccatctcccggcggcacgacgtcaacatggcaaagtacgccgataatgtcatcgccctccccccattcaatatgacctgcgaagccgtcaagattttttgttgtaaagccttctttttctccaagctccagcaatgaagtcaggctggcatttaccccttctccaaacggtttaccgggtccggcggttgtttcgtccatgacactgttgattctcaaaaattcctgcgtatcacgaattaaatcctctttttttctgatcacttcaacttcccagttcataatgatcccctttccgcaagaaatgacttgcaaaaaccaaataaaacgaataatattaatggtgttttgttaaaacgttcgtaattggaggatactatgtttcatctaaaagagcagcaaacatccataaagcaagaaatcatagcagggctgacgacctttttcacaatggtctatatcgtcgtggtcaatccggtcattctggctaacgccggggttcctttcgaccaggtgttcaccgcaacgattattgcctccattgtcggaacgctgtggatggccctggcagcaaattatccgattgctattgcgcccggcatgggcttgaacgcttatttagcctttcatgtggtaagcgcaagcgatggcggcatcacgtacgcaacagctttcagcgcagtatttacagcaggggttctcttcattattctatcgttaacgcctttaagaaaacaacttatagaagcgattccaaacaatttaaaatacggaatcacaactgggatcgggctgtttattgcttttatcggtttgcgtcaagcgggcattgtggcagctgatgagtcaaacctggtcactctcggcaatctgcattcacctggtgttattttaacgctggtcggccttttgatcagcgtggtcctgatggtgctgaatgtaagcggcgctttatttatcggaatggcagctaccgctttgatcgcctttttcaccggtcagctccattttccaaagggatttatgtcgcttcctcatttgccggaaggattgatgatctcaaatccatttatcgcttttggcgatgtcattcatcacggcctgtacgctgtcgtcttttcttttctattagtcaccatttttgatacgacaggcacgatgatcggagttgccgagcaagccgggctgatgaaaaacaacaagctgccaaacgtgcgaaaagcgctgcttgctgattcaaccgcgacaacagtaggagctgttttcggcacaagtccaacgactgcatttatcgagtcttccgccggtgtcgcagctggaggaagaacggggcttacggctttgactgtcgcggtgatgtttgcggcttcaatgtttttcagtccgcttgtcagcgccttgtccggtatagccgccatcacctcgcctgctttgattatcgtcggcagcctgatgatgggttcagtttccaatatgaactggaaagagatggacgaggcatttccagcgtttctcgtcattctggccatgcctttgacatccagcatttctacaggaattgcgcttggctttatttcatatccgatcgtaaaagcggcgcggggaaaatggagagagattcatccgctcgtcatcgttttcgccattctgtttttcatccagctgtttattttataacatagaccaaaaaacccaaacgtcgccgtttgggttttttatgtaaacaataaagagacagcggccgctaaaaaacaacaggcggcaaacgcatagtgcaggatattgatacagctttttctggcccgataatattcatcactttccttatcggcgccaattaaaaaaggggcatccatgaccttgtcaaaaataagcgtcaggatataacggcaaacccctgtgtatactagcagcgcaatcaccttcagccaaattggggaaacaaatatgagaacagtgaaagctgacaatagcatgtacatctgcctcgcatactcgccattcctcagcatgactttaaaaaacaattccttatagcctgtgcagatcgttcgtcttttaaatatcctttttgaattacggtataataacggttttcttctcatcctgtcttttacttttggcattcccgcctcctgactcatcatcatcacaagtcctgcaagagcaagcctgctttttttctcttcagtcacctcagcttcaaaagccgtgaacgaagccgtctttttcaaactgcggataactgagaaaagcaaaaataaaatgccaaaaagcgcaagcaagtgccactgagtcaaaacaatcaggatagcagaaccagcaaaaaatatagctctgacaaaaatatcgccaatccatctcgaaatggagcgcggctttctgatcctgtcttgctttaaggataaaaagaatatatgaaggccaaacaaataagacaatagagcagtgctttctgcgaatgtgatgtgaacagaatgactgataaggggaaggacaataaaaaagagaagcagccatttagccagcgtgaccagaaaagaatacaaaagcgcgtaccgtttgagctgatagatgatttccttcttttgcagcaaaaacactttgtccgcttccattaaaaatgtacgaatcgagcctgtaaacatgatcagcccacacacagcgtacagccatctccactccgccacttcagaccactcataaagaaggcctcttccattcatcaaatcaatatactgatagatgacaaaagcaatcgccggcaaaacgatgtagagagcgactgtccagtcaatgaccgcatgcaacactttaaactgatacttgtaatagtcaaacagccttcgaaaaaagagcgtacgcccgttcatggccgatcaccttgaactgccttataaaaacagtcaagcaatgactgcccctctaatccggtcttgtcctgaatatcttttaacgtgccttggagaaataatgaacctttctcaatcatataaaaccggtcacagattttttccgcggtatcgagtacatgcgtgcacataagaattccggctccacgttctttttcagccttaagcatgtccacaaagcgtttcgtcgatatcggatcaaggccgataaacggttcatcaatcacatacatatccggcttagagagaaaggcctggataagcattagtttttgctgcatgcccttcgaaaaggtgacaggcagctcatgtttgacatgatcaagcgaaaacgtctgcagcaggctttgggcccgatgcgcaaattctctctcttcaatgccgtggagtgtgctgatcagatccaaatgctcccacagcgtcagttcttcgtaaaaggacggatgctccggaatatatgcaaatgaacagtcgttccaggcaatatgccctttaaaatcttctgaaaggccgagtatcgccttgattgcggtgctttttccggcgccgttagctccgatcagtccaaccagctccccttttctgacttccagaaaaacatcggtgagcactttttttcggcttgtatacccggcctgttctattgaagcttcaagcaaatttgtcaaaactcacccacctccaaaatttactacgaaacagaataaaaaaagtttctttaaccataataatattgagccgaaatacatagtaatccaacaaggatggctgcccaacgcgaattggaaaaaattaataggagttatccctagattcatcactgcaatatcgtgtataatgagggcgaattattttaacagttacagatgtctgcctttgttgctatttcgtacgcagttgatagtcgtgagttgtggttagtcaagtccatccgatcttatgatagggagtggttttttgaaaccttcaacaaaccgtatgctaactcgaatcaaatcagtttacatgtttatccaagaaaaaggtcttgtgacaacacaggaactggttgacgaattcggcattacacctagaacgattcaaagagacttaaatgtgttggcatataatgatcttgttcatagtccaagccgtggcaagtgggagacaacgagaaagaaagtaaagattacctcataaattgaaaaattacatagggccgcctgagagcggtccgatagataatagggcgaagaaactactgagccttgtttttgtgtgcttataaataaaaccccgcattcggtatgcggggtttttgtcatgcttgcggctcattgagcaaatgaagctcttcctctgtcagctcacggtattctccgggtgccagagcgggatctagggaaacgcgtcccatcgaaagccgcttcagataaaccacttcattgccgacagcctttgccatttgcttgacctgatggtattttccttctgtaattgtcaggtatatcacggtattgccactgtcgtttgttttgatttccgcttttgccagctttgttttatagccgccctctatgtagacacccgtttccaaatcggagatgtcttcccgagaaatctgtgattttaaatggacttcatacgtttttggaacatgctttttaggagaaaggagccgatgtgcgagctgcccgtcatttgtgagcagcaaaaagccctctgtatctttatcaagcctgccggctggaaatggctcaaatctcatctcctccggcgtcagcagatcgaccactgtttgctgccggctgtcctcagtcgccgacagcacgccctgcggtttattcatcataagataaatgaactctcgataatcaaccggttccccgtatacggtcacctcctgcgtatcaggatcaacgtgcgcctttacatctttggcaggtttgccgtcgatcatcacggctccagccttcacaacggctttgacttcttttctggaaccatacccgctgttggcaagcagcttatcaagtctcattcccaatctctcctttataaaagaaagcccgcagcatgcgagccctcagtttcatcatatctagttcatcagcctgcatgtctgcctttctttaagaaacctggcaaacggcggcctaaaattttctgtaaaaatcctaatcggtagccacaatacaggtagacagctccgccaacagcggccgcgatcaccacaacaatcgcagcttgcagctggccatcctgataggaaataaagaagcctaatacccactgcacgattttcacggcaatacccataatggctgataagacaagcatcaaaacagttcgtttaactagtatcttatacgaatagcctgcatggcgcttaatcatgataaacccatataaaagggaagcgatatatccaagcgccgtcgctaaaatcgctccgtcagcctgcatcagcttgatcagcggaacattcagcacaagcttgatcacgacgccgatcacaaggctgacaaccgcaaatttttgcttattgatgccctgcagaatggctgcgttgactgtaaacaaagagaacagaattgcgactggcgaataccatagcaaaatgtttgcccccagttcagggtgaaggctctctgacccgtaaaagaacgtatacgtcggtcctgacaatagagagatcccaacaacagccggaataattaaaaacaggatcgtctgcatcgtttgattaatctgctgatttaacagcttatagtttccgcttgtaaacgattcagtaatcgttggaattaatgtcagtccgaaagcagttgctagggaaaccgggatcatcacgagcttctgaacatacagggttagaatcgcaagcatgtcttggctgatggcttgatgaccggcttcaatcatcgctttgttaaacgtatttgtatcaatatagttatacaaagggatagctagtccaacaaaaacgtacggagcagcatagctgaacagctcgaaaaacattttcttgtagcttaggtttgctgtcggacccgtattcggcatcatcgccagcaggctgcccttccgtttgttccaataaatataaagcacgaccagccctccgaaggcaccgatcagcgctgcgaaggttgcatagccgacagcgatgacaaggccgccgttgaaaaccttcaaaatcaagaatgtcgcactcaatagaaagatgatgcggacaatctgttcaacgacttgggaaacagctgtcggacccatcatttggtgcccttgaaagaatccgcggacaaggctcataatcggtacgaccaatagcgctaagcttaccatgcggatgacataaacgacatgatcaattgtcaggccgttattatccttgcctcccagcgatatttccgcaaacatcggagccgatagatacagaatgaaaaaggctatcattcctgtgacgagcataaccgacatgcccgccttgagcattttcctgcttgtctcataatccccttttgaattatatttggaaacaaatttagaaacagcggccggaaagcccatcgtagcaatattcaaaaataaagtgtattggttgtatccgtattgaaataatgcaccgcctgtcgccccgaccataatgctgaagggaattaaatagaccatccccagaatccgcgatatatatgtaccgagcgttaatacaaacgtgcctcttaacagtttgcttgacatgtttcttcatcaccattttctacgaagattcaacttttctattttaccacaactgggcatttagacggtaataaatacaaaagcaatcctgtgaacattcatgtccgcggcaaaagacgtttaaggagcggctttctttcgctataatagtactgcggacggggtgtccgcacacgaaatgaaaagaaagttgatgataaagatgaaacaatatgacgtaattgtaatcggcggaggcccttcaggcttgatggctgcgattgcagcaggagaacagggcgctggcgtgttgctgatagataaaggaaataaattaggacggaaactcgcgatttccgggggcggccgctgtaatgtgacgaaccgccttcctgtggaagaaattatcaagcacatccccggcaacgggcgttttttatacagcgcgttttctgaatttaataatgaagacattatcaagttttttgaaaacctcggcattcaattgaaggaagaggatcacggccggatgttccctgtgaccgacaaagcccaaagtgtcgtagacgcgctgttaaacaggctgaagcagctccgcgtaacaatcagaacgaacgagaaaattaaatctgttttatatgaagatggacaggcagcagggattgtgacgaataatggcgaaatgatccatagccaggcagtcattatcgctgtcggcggtaaaagcgtgcctcataccggaagcacgggagacggctatgaatgggctgaagccgcgggccataccataacagagctgtttccgacagaggttcccgtcacttctggcgaaccgttcattaagcaaaaaacactccagggcttatcactaagagatgtagccgttagtgtgttaaataaaaaaggcaaaccgattatcacacataaaatggacatgctgtttacccatttcggcctctcaggacctgccattctcagatgcagccaatttgtcgtaaaagagctgaaaaaacagcctcaagtgccgatcagaatcgacttgtatccggatatcaatgaagaaacgcttttccaaaagatgtataaagaactgaaggaagcaccgaaaaaaaccattaaaaacgtgctgaagccttggatgcaggagcgctatctcctattcctgctcgaaaaaaacggcatctctccgaacgtatcgttttctgagctgccgaaggatcctttcagacaatttgtaagggactgcaagcagtttactgtcctcgcaaatggcacactgtcgcttgataaggcatttgtcacgggaggcggggtatctgtaaaagaaattgacccgaaaaaaatggcttctaaaaaaatggaggggctttatttttgcggtgaaattctggatatccacggctacacaggcggatacaacattacctccgcccttgtcacaggcaggcttgcagggctaaatgccgggcaatacgcccgttcttaatcattactctttaaatctcttgccgccaaactcacatttgaacattccccgcattcatgttagggtgagacttgttttgtttcacctgattgcggggtaattttaagagaggaatgagctgccatcgtacgaccatactaagcctgcgagcaagatataggcgtacacaaaaaattagagggtgagaaatgttgaaacatatatctagtgtattttggattgtgattgcaatcacagctgcagctgtattatggggtgttatttctcctgacagcctgcaaaatgtgtctcaatcggcacaagcatttattaccgattcatttggttggtattatcttttagttgtctctttgtttgtcgggttttgtctctttttgattttcagcccgatcggaaaaatcaaactcggaaagcctgatgaaaaaccggaattcgggttattatcatggtttgccatgctgttcagcgcaggcatgggaatcggcttagtattctacggtgcggctgaaccgatcagccattacgcaattagctctccatcaggtgaaacagaaaccccccaagccttcagagatgcactccgctatacgtttttccactggggtttgcacgcttgggccatttatgccattgtggcattatgcattgcctatttccaattccgcaaaggcgcacccgggttaatcagcagcacactgtcaccgattctcggggataaagtaaacggaccgatcggaaaggccattgactgtattgcagttttcgccactgttgtcggggtgtcaacaagtcttggtcttggcgcaacccaaattaacggcggtttgaattacctgttcggcattccgaatgcgtttatcgtccaattggttttaatcattattgtgacagtgctctttttactttctgcgtggagcggactcggaaaaggaattaagtatttaagcaacacaaacatggtattggccggattgttaatgttgtttatgctcgttgtcgggcctacagtgctgatcatgaactcatttacagattctatcggacaatacattcaaaatatcgttcaaatgagcttcagactgacaccgaacgatcctgaaaaacgcgaatggattaacagctggacgattttctattgggcatggtggatttcctggtctccatttgtcggcattttcatcgcccgtgtatccagaggccggacgatccgagaatttttaattggcgtcttggtgacaccttgtattttgacatttctatggttctccattttcggcgtatcagccatggatctccagcaaaaaggcacgttcaatgtagcaaagctgtccactgaaacgatgctgttcggaacacttgatcactatccgctgacaatggtgacatcgatccttgcattgattctgatcgcagtattctttatcacgtctgctgattcagctacattcgtgctgggcatgcagacgtcgtacggttctttaaatccggcgaattctgtgaaactcagctggggtatcattcagtccgccatggcggctgtgctcctatattccggagggcttgccgctttgcagaacacagcgattctggcagcgctgccgttttctatcgttatcctgctgatgattgcctctctctatcaatcgctctcaaaagaaagaagagagatcaaaaaagcggagaaactcgataaaccgagaagtcctagagtgaaaaaagcatattaacaaaaaagatctttccgcgcctgcggaaagatctttttatttgcgatataaaataagggcggaaaaacagtaaagctgctcgccgtctgggtcgcacgcggccgaaaccgtatatttgatatcaatcagctgctcctccgatatcccttttaaaaatgaattgatttccgtctgtaagtctttttcatgctcttcatcaaataccgctaccttcagcattttatccgctctcctttctctatcaatctattccgtttggaacagcgttatgatagagaaatgatgattatctcgtttccggataaaaagctttccgtatatgggattccctctgtggctcgccgccttgctgctccactttcagcagcacggcataaacaatgcgcatatgacagtagctgataaggctgacgctgaaaaaagggacaatgcccggcaggtacgcaagcaagaaaaaaagagcaacagtcagcgcaagcatagcaagcgtatattgcaaatacgccacactgagcaagagcgaaaatttcacatacagacgttttttccagtcaaaatggacaagcagcggaaacacataaaaaagcatggatacgaacaaaaagccaaatatcataatggcgaagcgcaggatgtgcagaaggaaatgacttggataaatgaaggccaaatcaatataaatgatcactccgatgagcgccagtacagcgccgagcagatttgaacgaaaaaattcacccttatattcctgccaaaacgttttgagcacgggaacgttgtcctgcccctgaatccacttccgcatgacagcgaataaagccgcggtcgcgggcatgatgccaaacacaccgagaccgagcaacgtaaaaaacagccacagcaagtttgtatacgcaaatctcatgatccattcgcaaaaacgcagcatccgtcccagtgagccatcatgttccatggcgccccctcctttttttgcattatacattctgcatctgaaaaagctctttcatgccgatcggcttcttttcggcaaccgagcgccacattccctcaccaaccgcgatggagtaggctccagcttcagccccggctaaaatatcatagcggcgcagcgggtcttttcctaaaaaaagatcctcaagcaaaagcggatcacctccgccatgccccccttcatttttgaccacttgtatcgtctgctttgattcaaaaagcggatagtattcgattgtctgctcaggaaaagcaaacggaattctggaaggttcgtgaaattcatttgattcaatacgcccttttgtgccgttgatcgtcagccggtagccttcatacggtgccgaaaaaataatcgagtagcttaacagtgcgccgccatcatatttgactgccgccacgtacgtatcctcgatgtcaatttcctcgtcaaaaatacacgcgtcaggcctgtatgcagtatataagctagactggtctcctgcttcgagatgatcatcttttatagaagctttagaggaacggggatgccaccttgaatagtagtggcatttttctttaacacggcacgtcccgcaaaaacgcccgtcttcttccggcaaggggttccactcactgtccggcccatagtaattcaaggcgccataagcaaatacctcttccggattttgcccgagccaccaattgacgagatcaaagtgatgtgttgatttatggacagaaaggcccccggaaaactgtctcgacctgttccagcgtttaaaatagctggcgccatgatacgtatcaatataccaatttaaatcaacggaggtgaccctgcctatttttccgtccagaatcatttcttttattttccgatgaaacgggctgtagcgatagttaaacgcgacggtgacttttccttcgcttttggcctccgcttcaagcacccgattcgcatcctgcactgttgtcaccattggtttttcagtaattacatctgtatcccactgaaggctttttacaatatatgtgacatgcgtatcgtccctgcctgccacaatgacgatatcaggctttgagacgcgcatcatctcgtcaaaagcatcttcgctaaactcaggcacgtgggccagctcgggaaatttctttttgcaaacggcaaaacgtttcggatcggcatccagcaatcccgtaatctcataatgagttgaaaaccgctccaacagcggtttgataaacatactgaatgctctgctgctcaatccgcaaaagacgatgttcttcaatatcctcacctctatcgggcttcagttagttgagaaatcagctgcagcgcttcctctgttttttcagcatacacagggataaacgccgccatatcgcgattcaatcgaaaagaatagccgttcagctgttttttccctttttcgatctgaacggcatagatcgttttttctcctgttttattattaacagttgtataaggagatgttttttcaggaggcaatccgtttaacggctgaaaattttccggatcattgtaagcttgaaacatgtcttcaggcacgatgaaaacatctccctcatgggcggtaatttcagtcagcagtttttcctgaaaagctggaaagatatcgaccttcccagcattctgctcggcggccttttttattttttcctgtacgccagcctgcatatcagaaaagagaatgacatgcattccgtccgtcctgcttgagcatgatgccaaaaagagcactgagacgatcacacacaaagccgtacgtatcctttttgtcatttccccgctgacctaaaaagaggctccagctctgtcatagctaaaataaacgcgccggctccgtgcagatcgtttttgcttctttcgcggctgacataatagtcatagaaaccggctgacgttccgacacatatgtctttgacgagaaacgcgccgtcttctgatgtttcggttttatgctgaatcaagccttgatacgcttttagcagtgttgtttcgtaagctctgtctaaatagcctttattgattcccttcgcaaatgcgtacatgtacaggcaggatcctgagctttccagccagttatcagacctgtctcccttatcaacgatctgataccataaccccgtctctttgtcttgatagcggcagatgctttccatcatgtcctgcagcgtgtttttccacccatgacggtttggatgcttcttcggcagctcttcaatcatgtcagcaagagacatgacgtaccagccgatggaacgtgcccaaaattccggtgaacagcctgtctcttcattggcccaaggcatttttttcgcttcatcccaggcgtgataaaagagtccgttttttgcatccttcgtatgctttctcatcaatgactcctgcagcacgacctgatcaaacagctccggctcctgcttcagattggcatatttcagtgcgaacggccccccatgtataagccgtcaagccacatttggtatggataaccgtctttgtgccaaaaaccgccctcagacgtccggttcagtgttccatataaaccgcgcagcctttttgccgctttggcataccgttcatccttcgtctgctcgtataatggaaaaagaatgagacccgcttgaatggcgtccagttcatctcttctaaataatagattgccataatcatcgattaagagatctgcataggccttcgcatactcaaaataccgcttttccccggttgcttcccacagccgcaatacaccgcataagaaaacaccctggtggtagtgccagcggtttgcaggaggcagctcctggactgtgtacgtattcataatggtttttgccaatgcctccgcgtacgtaagaggcgattttacagcgattgattgatccattgatcccatccctttcttaataaattccttcctcgccaaatttcttcgctaaacgattcgcaagcatgaccaaaatcagcccgaccgccgctttaaatacgccgactgctgtactgtagctgaattgtccctgtttcagccctgcagtataaacgtacgtatcaaaaatttccgccacttccctgtttgtcgcatttaacagcaaatacacatgctcgaagccaagctccagcgtgtctccgattttcaaaatcagcaaaacgacgataacgcttttaatggcgggcagcgtaatatgccacatttgccgcagccgtcccgctccgtccattttcgccgcttcatacagctgggggtcaaccgctgtaatggccgccagataaatgatcgtcgaccagcccgcttccctccagataacctgaagaatatacaggggccggaaccattcttcgttcagcagaaaattgattttttcaccgccaaaaaacacaatcagttcattaatcaagcctccgtctaccgttaaaagcacaaacgaaagcgatacaacaatgacccaagacataaaatgcgggatataaatcagcgtctgaacaaattttttaaagagagcaatccgcacttcgttcaatagaagcgccagcagtatcggcaccgggaaaaatatggccaggttcaaagcaaataacacgagcgtgttttttaacaagagaaaaaatgtaggctcagtaaacagcctgataaaatgcttcagccccacccactcactgcccaaaatgccgaggaacggctgataatcctgaaacgcaatcacaattccccacatcgggacatacttaaaaagcaaaaaataaatacaccccggcaaaatcatcaagtacaaatatttttgctgaatcagcttgattagtaagcgctttcttttttcttttttaaaaatgactgtatcaacagccggcgcttgcgcttctgctgttttcattttttcccatcctcctttcacgggttcttgcattcactgtagcgcagaggtaaaagtccgtctacaatcatatgatcacatcctgttttatccctttataatcaaaggttcaggaggtccacctgaaaaaaagacaccgatattagaaaatgattattgacaatatctatcaatctttggattaattgtattaaggtgaagtggatgttatgaaatggggggttttatgaaaagaagccaatacaagttttactacaaactgattacgtttttctgcctgctcagcaccattccggttattttggtcggattgttttcgtacgagcactctcagaaaacggctatatccaacgtttcagaggaaaaattcgacacactccagcagacccagcaaagcatcgagcatatattgaaaaccgtcgatcactctttaacccactatgtgagttcgccgcctctccttcgcacattgtccgagcctttgcactcagaccaatttcaaatctataaccaagtgaaccaagagctcaattatctgcaaagctttgataccgatctgtccaacatgacgttagtcagttatacgaaaaaatggtacatgaacaattccggtttgtaccgtttgaatacagacactcttcatgaagcagcctcagcgtacacgaaacaaaaagcgagccgctcctattggacgcttgaggaaaacaatcatttgatttcaaccaaagaaggcacagcagaaaactgccgctacaatatcaatttaattaagcagcttcctttgaacagcacaaatacaaagggattggccgccgcaagcatcccgagctgttcgcttgtcaaaaatatgcccggctattcaaacgccaacaacctgtttatcatcgatgaaaaaggcctcatcatccttcataacaatatgtctgacgttggtgaatctcttcataacgacggctttgtccaaaaagtgctggcgcaaacggccaatagcggacagtttgaaacagttattgaccggattcattataaagtcacctatcaaaaatctgactataatgcatggacttatttttctctcgtttccctgcctgagttaaaaaaagaagccaaatcaatcggctggatcacttttgcagtatgcctcattttgttaacgctttcattgctgttctcttggcttggctcccgccatttttacaagccgatcagggtgctttacgaatcattcgcaaggcatggtgccatacaagaaaaacagccgcctcaaaatgaatttgagttaattgaacagagctttaagcagctgaaggacagaaatgatgatcttgaagaaacgatgaagcagcaagccacccacctgcagcaatattttatggtcaggcttatgctcggaaaactgacggatgaggaggttaataaccgttttgaaagcctcggtttaaagcaaaattggcggcaccttgccctgcttgtgctccaaattgacacactgaatcatacgccttatgagaaaaaagatatggatctgcttttgtttgccgtcaacagcctgattgagcgcaacatcccgacggacaaacatcttgcccccgccgtagttgacaaacagcaggcgacgattttgatcaatcaaagcgggacaaaggaagaattcatggctgagctgaatgagactgcaaggatgattcaggaaaaagcggaagctgagctgcagctgtctgtcagcatcggcatcagccagccgtttgatgtgctgacaaaagcgaaaacagcctatgcggaaggctcagaagcgttgaaatatcggctgaaagcggaaaacaagtcgatcatcttttacgaagaccttgaccagaaaaaaaccttcaaaacccattttccaaagcagcttcagcatgagctgttcgatgctgtcaaagcaggagacaaggagaaagcggataaatgcctgcacgcgattttacaagccattttcacccagaacaccaacccgtatcaatttcaaatcgccatcgcccgttttttgaaccatgtgattgagctgatgcatgtgcttgggatcgaattgtttgagcttgaagaaaacaaaatgctgtatgaccaaatttttgagctgaaaacgttcgaggataccgaaaactggctaaagaatgagtttattgatccgatgacagacaaagtgaacgcccgcgcggatgcccagtacaaaaatatttccgacaacatcattcatatcatccatcatgagtttgaatccgaattgacactggacgaaatcgcacgcaggctgcattacaacccaaattatttaagcagtattttcaaaaaagaaatgggaatttcattcagcgagtatgtctcaagctaccgacaccatatggcgaaaagctggcttgccgaaaccgacatggcggtcaaggacattgccgaaaagctgaaatataaaaactcgcaaaacttcatcagatcatttaagaagctggaagggattacaccgggaaactaccgccagcaaaaaagaagcatgtaaaaaacccaaaaccgcttgcgcgttttgggtttttccaatgttattttgcttgtttaaacgcttcttcgtattcctgaataatttgttttcctccgcttgactcccatttttccacttctttatcgaactggctttctgtgatgtctccaatcatatatttgtaggtcgcgtcatcaatgattttcttcagttcgtcaccccgttccgactccgatgcggaatacaggctttcagccgggtttgagacgataatcttttcattgtcctcggtcagctcctcgtacgccgtccgaagcggatctccagtgttttttaagtaggctttatcaatggcaattaaagcggacagcggctgaatatcagtctgccagtcttttacctggctttctttgcgtgtaaacgttttgtcctcacctttgttgtaatgaacgccgtcaatgccataagtcatcaggctatagacatcttcttcggcaattcggtcaaaaaacgccaagatccgtttaagctcagcttccgttttcacactcgttttcgggaaagcaaacacgccgttatggcctcctgatgcccatacccgctctttcccatctgggccttttatgcggttgatgatctcgagcttcatcgatttatcagaggcatggtcgcgcagattgaccgcatctaccatattgccaatataaattccggcttttccttgagaaaacagctcctgctgctgggttttgcttgtgacgggaaaatccttattcatatacccgttatcacgcagctttttcatatagttcatcgtgtctttgtattcctgtgtcatgaaatcaggcgtgaatttgccgcccgattccttccaatctgtcggcatgccttcatacgagccaatcgttttaaacgcgccgtaaatcaagtcattacggtctgccagcccgatcgtatcatctttcccatccttgtccgggtcgtcctccgtaaatgctttggccacttcataaagctcatccaacgttttcggggttttcaaatttaaattgtccagccagtccttccgaatgacgatcccctgtctggaaagcgggcgctctctgtatatcccgtagagctttccgtcaattgtcacatttttattaatgagtttgttcattttgtttaagttgggataatccttgatataatcgccgatttcccaaaacattcctgaccgaaaggcattcatgactgacgaatttttaatatcctggatggtcacgatttgcggaagattcccggctgcaagcgctgcattcagcctgtcttctttcaccgcgtctggaacccaggtgatgtcgagttctgtatttgtcagcttttcaatttctttaatcgccctgtccttcggcggctgctgatgatacaaaatcgccatccaagacagctttatctttgaatctgggccagctttgccttcagccgaagactgatcagttcctttacagcccgccagcactccgccgagtgccagtacaagcacaatcaaaagcaccctccatttgtttcccatcgtacccctccgtttcatatttctttatcctttgacagatcccagcaaagctccttttgcaaaatgcttttgtataaacggatagacaagcagaaccgggatggtcgccaccactatgaccgccattttaatggtttgctcaggcggcgggctgcccgaccccatttcagacatatccccctgcataccgcttgatacaatgacgatttggcgcagaagaacctgaattggccattttgctgaatcatttaagtacaagatcgctgtcatatacgtgttccaatacgtgaccgcataaaatagtgaaatcgttgcgatcgcaggaagagacagcggcagcacaattttaaagaatatgcccagatcattgcacccgtcaattttcgcggactcttccaggcttgatgggatattttgaaagaagtttttcagaatgatcaggttaaaggcattaatggctgtcggcaaaataagcgcccagtaagaatcgagcaatccaagcgatttgaccacaaggaaagtcggaatcatgccgccgctaaacagcatcgtaaatacgacgagaaacatgagcggctgccggccgattaaatcatggcgggataacccgtaagccatcagtgaagaaagaaacatgctgaccgcagtgcctatcactgtcacaaacacagaaacaagcaaactcttataaataatatctgttgaaaaaatgtagcgataagcatctagcgaaaaagtggtcggtattaaaataaattttttcgacacgacttcttctactgtggcgaaggatgctgcgatgacatgaatgaacggaagtacgcatattaaagcgaacatcagcaagaaaccataaatcaacatatcaaacagacggtttttcagtgaatgtgcgatagctcccacctctctttgtaagcgttatcatatttcggaaaccgagctcagcatgtgacgatatcgtgtctaaaatgtagcaaatctgtgattgccatgtctataatcatttgaacagtgtccccggccgggcgggggctgccgcgaattgagaccgataacaaaagaaaaagagcataatcttagaaaatgattatgctccgttctcctcctcgttcagaagttcagccgtattgatttgtggcgaaaacccaagttcattcacggcagattcaatggaccatggccggcccggattatcagagacggcgtaataagtgccgtaccggatattggtctcaatagcggctttgaaaatcgacagcagatcggggtgagaaagcagtgtctttttcgtccgttctttttcatgcagcgtatccatttcatctgtgacgactgttccgattcgcaggttgattactgatagcttattttccaaataaaacaaatggccgatctgttcagaggtcagctttaatacaccgtacaagttttttgacagcggataatcgcttgttgtgatttcccgtcctaagagcgagcgcccgtctttttcgtagacatctgtgacatgattactgctggcgaacacgagcttttgaatgccgagctccgctgccgcacggcacagataatagcttgccctatagaaaacatccgtcattttttcaaactcagcgatgtccataatatcgtatttgattttcacagcgagtaaattcaagatgacatccgtatcttttggaatcttcttcaacagctcctcataatttgccgcgtcagcctgaatggaagaggctttgccatcgaaatgatctttatcaagcacagtcacttcatagtctgaaataagcccttcagcaagcagtctcccaatcacaccatttccgccggcgatcagcacttttttcactatgttcactccccttttttatagattgcccattttcggcggggctgacacttttttggcactcacattcttaggcttattcaaaagtcaccggcagctcctcaagcgcccgaaatccaaaaagcggccgataccgccattcaaaatccgcgagattaaggctgggcattcgctgcagaagagtgttaatcgcaatttgcgcttctaatcgtgccagcgaggaccctaagcaaacatgatggccatgcccgaatgaaagatgcggattaggacttctcgtaatatcgaagacatcggggttcgtgaatatgctagggtctcgattagccgcccctaacaaaagatagacttgttctccttgacggatcgtcaccccgctgatgtcaatatcctctgacgcaactctggctgtcatttgcgtggggctttcatagcgtaaacattcctcgactgcggtatcaataagatctggattttctctcagtttcaaaagctgttctggatgctgcagcagacaaaggactgaattgctgatgagattgaccgttgtctcatgtccggcgatcgccagcaatatgcacgtagatgccgcttcctcttccgtcagcttatccttttctttccccttcaagagcatgctgatcatatcctgttgagggtggcgttttctcttttgaatcagctctttgaaatatgccatagcctgcacagccataatattgccctctgttaatgcctttcttgagcgggtaaaatcaatcgtttgaatgagactcgcagcccactcctttaattgctccctatcttcctccggtacacctataatgttagctatgacaaaacttgctaaaggaaaagcaaagtccgaaatgacctccatcttttttttaccttgcacttgatcaagcaaatgatggacagtttcaatgatatacggctgataactctctgtcgttctcggcgtaaacgctccgctggcaagcgtccgcaatcgtctatgatcaggccggttctgaaacagcatcatttgattttgcacatgtgaaaggtcctgatatttggttgagctctcaggcagcggggtgcggactttgaatctcgcatctttcaaaatagcagccgtttcttcatatcctgtgacataccagcccgggtattttaagaaactccctttatagataggatgaacagctcgcaatgtgtcgtaaaaagaatatgggtttttcaaaaactcagaagatgcagttgacgatgcaattgtcacgtgattttctcctttctgttcaaaaataaaagcaatcgacatcataccgattgcttttattgattctttcagcttttcgcacttaaactggccttcatttcttcgactgattcaacttcaaagcctaaatcactcagcattttatgatcctccgtctcctcttgcccggcagttgttaagtagtctccgacaaaaatggagtttgcggcgtaaagccctaatggctgcaatgagcggagattgacctctcttcctccggaaatgcgaatttcttttgatggattgataaaacggaacagcgccagcacttttaaacaatacagcgggtttaattcgttgacgccttctaacggcgtgccatcaattgcatgcaaaaaattcaccggaatggaatccgcgtcaagagccttcaagcttttggcgatgtcaatgacatcctgtttcgtctccttcatcccgataatggcgcctgaacacggagacagccccgattcttttgcgatttcaaccgtattgactctgtcatcgtatgtatgtgaggtcgtgatgtttgaatggtttctctgtgacgtattcaaattatgattatagcggtctactccggcatctttgagacgcttcgcctgctctggcttcaacagtccgagacacgcacaaaccttcagtccatacgtctctttaatttcctgaaccgcatctacgacctgatccacttctctgttagacggccctctgccgcttgccacgatacaatatgtgccgatattcagatcgtgcgcccgcttcgcgccttcaagcagcgtttccttattcaccatccggtaagactcaatcggcgctttcgaaatcgcagactgtgaacaatagccgcagttttccgggcagagcccggatttcgcattcataatcatattgagctttactttttttccataaaagtgttttctgatatgaaaagctccatgcattaatagcaaaatatcttcatcaggacaatgtaatattgaaagcgcctcttcgtcagtcacttctgctccagccagcacccggtctgcgagttccatccattgattcattctcatacccccacttgattcatcagtaatgatagattgatatggtcttttaccatatgtagaaccgtttctttcgtcacgttggcaagctttggcgtaacccctaaaatcggcacaccgcataagcgctcaatcatctcaggattggttttttcatcttcatcaggagagtcactgattccattgatgataattccggcaattggaagccccatgctttctgcatatttgacagttaaaaaggtatgattaatggttccaaggtgaggacgtgccacaataatcatgggaagctgcaacgcttttatgacatgactgaccaaatagtcctctcccaatggcacagaaataccgcctgcaccttctacgatgaagcattcatgtttttctctaatccgcccccaatggcttaaaacctcttccatggtgacagtctttccctcaagtttccctgcaacgtatggtgcaagcggcgctttgaaggcaaaaggcgtaatgtcttcatgagaaagactggtctgcgacatgtctttcagcaaacttgtatcactatctggatgatgacgcgatatcccgcttaaaaatggtttatacacaccgacatctctattatgttctttcaataaggcagcaagaccgctggatataaccgttttccccacttctgtatcagttcccgtcacaaaaaaacccctcaaatgatatgcagctcctttccgattgaatgaaatgttttcagcaaatcatcaatatcacccatactgtggtcagacgtgattgtaattcgaatacggctttcacccggtgcaacggtcggcggccgaatggcaggagcataaattcccttgccctgcagtttttcagcaaataggaccgttttatgggcatcgccaatgactacaggaataatcggtgtgtgatctcctttcaccacataacccatattcttcagactggttctgatcgtactgatataagaaaataaaagctgtcgtttttccctgctggcttcaatgatgttgaaagcctcatgagcagccgcacagctggctggcggaatagcggtttgaaagataaatgttctggcatggttcagcaaaaagtcgatgaagaccgctgatcctgccgcaaaacctccttccgcgccaacagctttgcttaaggtgccgatcacaatgtcgggacaaacaccaaagtattcactcgttcctcctcccgaatcgcccaaaactcctgttgcgtgggcatcatcaacgaccacgaaggcatgatagcgtttcgcaagtgagatgatctgatcaagaggggcgattgtgccatccatgctgaataccccgtctgttacgataaaacggcgctgataacgctgtgtttcattcagcttgttttcaagatcattcatatcaatatgccgataaacaactgtatcagccttagaaagtcggcagccgtcgataatacttgcatgattgagctcgtcacttaaaatgacatcttccttttctggcaaggatgaaaggagaccgacattggccaagtaaccgctcgaaaacagcagggccgcttctgtccgtttaaagctggcaatcttcttttctaacttttcatgccagaccgaattgcctgtcgttaaacgtgaaccgctgcttcctgtcccaaattgctgcaatgctgtttgggctgcatcgatcaaacgtctatcgcttgcgagccctaaataattgtttgaggaccagaccgtttgattttcgccatcaatgttccgctctggaaccggcgctccatccattgaccgcaggttacggtgtacgccggcttcctttactatgtctaaccgctcgtttaaccaggaatcaatcttcaaggctcgtaacctcgtggatcgcttgtttcataatggcaaccatttccgagagctcttcagctgtgctggcaagaggaggaagaaatgcaatcacgtccccaagcggccttgtcagcattcctaactctctcatttttaaggaaactttgtatccaatccgccgatcagccgggtaaggttctttggtttcctttgatcgtacaagctctgcaccgcacataaagccaagctgccgaatatccccaacataaggaagagcgtgcagatcttgaagaagaaaatggagctttttactttttttcgctacttgttccacaatgttttcagattcaaataatgccagattttcaagcgcaactgcacagccaagctgattgcctgtataggaatggccatggaaaaaggtttttaggttttcataatcatcatagaatgccttatagatgtcttcagtggcaaacgtaacggcaattggcaaatagcctcctgtaatgcctttaccggcagccatcagatcaggctggacattctcgtgctcgcacgcaaacatttttcctgtacggccaaagcctgtagcgacttcatcaacgatcattaagacatcgtatgttgtacatagctcgcgcacgcctgccaaatatccttccggcatcacgatcataccggaagccccttgtaccattgattcaatggaaagcgcggcaatttcctcgtgatgttccttaagcagctgttcaagctctcggaggcactgatcacggcactcatcaggatcaccgctttcagagcgatacacataaggaatcggggccttgtaactctcgaacatcaacgggccgtatacgtggtgaaaaagctcaattgaaccgacactgacggcgccaatcgtatcaccgtgatacccgtttttcattgcgataaatttttgtttctcgggcttcccgatgttcttccaatactgaaacgccatttttagggctatttccatcgcttctgcaccgctgtctgaataaaagacccgcgtgagcttttttgggctgatatcgattaatgtttcggcaagctgggttgctggaacgttggtcatgcccaataacgtggagtgcgcaatttttccgagctgtttttttatggcattatctagttcttttttgcggtgtccgtggacattaagccaaactgatgaaaaaccgtcatagtattccttgccatttatgtctttgactttgattccagtcccgctttcgatgattaaggggttttcatcataatctttcatttgggtaaatggcagccagaggtgctttttacttttttctatcaaatcatgagtcatgatcttcctcccactctattaaaataggctgcttctccagatcatgtatgtacgtgtttacatcattggatccatcaataaaaaagactcggcagccctcttcagtcccgtattctttcattgctgtaatacgctgatagcccattttcttacccgcaacatagcctgttatgtaatccggatcgtccgaccagcataattctgcaacggctgccgggtgccggcttacctttgaagcgagcgcaagggcctcttttattcttgaatgagccggcacgtgactgtgaagcgcccatttttcaaaattagcgtccggccaatccattctggagacccgcacccctttttcttttgtttgatccattcgctttcctgtatgaatatcaaacaacaccgcacccctgatatctgaccattcagggatttgttcatatgctttttcaatcacgtctcgtgaaacgccttctttttccaataacaatcgggccagcttttgcccttcttccgggcagctcacttcattcgtatgcacaggcaatggctgaatggtttttatcgattcatatacctcttcaaattgaatttgcataaaatcaggttttcctcttgaatgggataaccctttttctaataaagcattgactgtatgcttcatctcatggaaaggtataagccgttctccgccggatatatgctttccgccgtcttcatgagatccattcatagaagccctcattctgacactataaaaagtttcttcttgcatcatttctcgccctttcactgataactgaagaacgtgtagtgcttctcaccttaattgttaaccaattatattttaaggttaacaattagaatatattattctctcctgtttctgtcaatagaagaaagcatcgatttatggcagttggttaaaaggaaacaaaaagaccgttttcacataaaacggtctttttcgatttcttttaacagtcacagccacttttgcaaaaaccggacagcttcatgcctcataactgctgtttcgaaatgtcccgaagcagaacggaccactcggtagcaatcagaagctccctgtccagcatagacagctgtcaattctttttcgattttgtccacgccctcggccggcgttaaccgatcgtgtacaccaacaagactaaggtgcgggcgcggcgcgatcaggccttggatctccgatgcggaaaaatgctttgcaagcgatgggacgtaataataaaagccgtgcctgtcaagattctgtgttttgatcagcacgtgatgatccacctggctgcacaaatccacacacaccttaatccggtcatcgagcgccgctgtccaccacgccatcaaacctcccatagacatgccgatggttccgatcctgtcaggctgaacatcagagcgtaactgcatatagtccaacgcacttaaactgtcataaatcatcatcccccacatcacttttccggtgagaagcatttctttaaatatctcgctttccgcttttccccgccgatctccaaatccccaatgatcaatcgcaagaacgccgtatccgagtgaagtaagctcatcagaaaaagaaggcgttttcaaataatccgctccctcaatcagctcactttttcccctatcatactggcccccatgcgaatgctgaaacaatacggctgggcacggtccttctgttttcttcggcttcacaaaataagcgggcaccttttcatgtccatttaaatcgagcaggagcgtttcaacgatattttcttctctttcttcaatacgtaatgtctcaacactgattggcctccgatcaggcaaatcaccaagcaatcgaaacagttgctttcttctttcggctctcatcccatcacccttccttattcgcttacttcacatttacgagacagatctgggttcccctttatttttccaacataaatcacatcatttactaaatatttagtaaatattatgaaatatttcgaaaacaattattgtaaccgcttacttttatatgatagtatcaatttatcaaaaacagatgagttaatattttactaaatagatgagagggatacccatggttcgtattaaagatatcgccttgaaagctaaagtttccagcgcaactgtgtccagaattttaaatgaagatgagtcgctttctgttgcgggcgaaacgagacaaagagtcatcaacatcgctgaagagcttggttatcaaaccgttgccaaacgccgaaaagcccgcgggcaaaaacagcgggctcagccgctgatcggtgtgctgagctgtctgtcccctgatcaggaaaggcaggacccttatttttcttccattcggaaagggattgaaaaggaatgctttgaacaggaaattttcattacaaattcgattcatctcggctcctttcaggaacatatctttcgggaattggatggtgtcattgtcatcggccgtgttcatgatgaagcggttaagcatatcagcgggaggctggagcatgccgtatttatcaatcattcaccagatccgcaagcatacgattcgattggaatcgattttgaatcggcttcacgccaggcgattgatcaccttttcgacttaggctacaaacggttaggctacattggcggacaagaaaaagagcatacgctgaaggacggccaaagcattcgcagaacgattgaagataaacgcctgaccgcttttttggagtcagccgccccccagcctgagcatgtgctgatcggagaatacagcatgcgtgagggctatcgcctgatgaagaaagcaatcgatcaaggccatctgccggaagcattctttattgccagtgattctatggcgatcggcgcattaaaagcgctgcaggaagccggactgcaagtgccgcgggatactgcaatcgtcagctttaacggcattgaggaagctgaatttgccagcacgcctttaacaacggtgaaggtatacacagaggaaatgggccggacaggcgtaaaactgctgcttgaccgtctcaatggccgaacacttcctcaccatgtcaccctgcccacaacattaattgtaagacaaagctgcggatgtacagcaaaggaggtgacataagcaaagattcatcacgatgataaggaggaaaagatgaaacacacttttgttttatttctctcttttattctgcttgttctgcccgggtgttcagcagagaaaagctcagcagataccgcaaaaaagacgttaaccatttattctacaatgtcaaccgacagtgaaagagatacgttcagaaaactagcggcagcattcgaaaaggaaaacagtgacattcatgtcagccttcatttcccaggcaatgactatgaaaatatgatgcgtgtcagaatggcggccaatgatttgccagatctattcgatacacatggctgggggaaaatcaggtacggagaatatacagcggatctccgggatatgaaatggactcaagatcttgatccaaatttaaacagcatcctcaaaaataaaagcggaaaggtgtatgcctatccaatcaatcaggcaaaagacggtctggcgtataatcgcaatattttagaccgttacggcattgctccgccggaaaccatggatgactttatcaaagcactgagaacgattaaagaaaagagcaagggaagcattgttcccttctggtttgccggatatgacaaaagctcattcgcccaatattacgaccaattcgctacacctcttctcatcacagaccctgcccataatgaaaaaaaacagctcaccaatggcactttcaaatggaataaatttacttacttatcgaaaatcctcaaacaaatgcagaaagaaaaattgattaacatcgacgccgtcacggcaaaaaaatcacagctcattgaattaatggcccaaaacaaaatcgcctttacaatgcaaggcggcacactcggccaagacgttgcccagatcaatccgaacgtcaaggtcggcattatcccgacacctgccatccatcccggtgatgacccgatatggatcggcggtgaacgctacacccttgcagcatggaaagattcgcctcaattaaaagaggcaaaagattttatcgcatttatggcccgcccggccaatgccaaacaaatggctgaagccacatcgcttccttcagggctgaccaatgtgaaagctgatattttctacgcaaacgattatgagcattatcaagatgtcaaagtcgagccttacttcgaccgtttatacttgccaaacggaatgtgggatgtcctaggcacggttgggcaggagctcgcggctgacattttggcgcctcaagacatttcgcagaagctgggaagagaatataaacgactccgggagcaatcggaaatacagggagctgaaaacaatgagtgagatcgcaagggacgttcatgtgaaacaggttaagccaaaaaagcagtcctcactttggtggatgtacattcctgctttgctctccgttctggtctttatgatttatccgtttgtgaaaggcacattgattacctttacaaactggaacggcttttcacaagtttaccaatgggttggattcgcgcaatatgaaaggctgttttctgatcctgacacttggcatatcttaaaaaacacgctgctttacgggcttggcagcactttttttcaaaatgtggtcgggcttctatacgctctgctcttaaatcaaagcattaaaacgaaagcggtaacaagaacaattgtgtatttgccggtgatgatcagcccgctcattatgggctacatatggtactttttcttctcctatgacggaggcgcgctcaacgatttgctcggggtcttcggcatcagccctattaatgcgctcgccagtccctcgctcaatccatggatcattgtcatgattaacacctatcaatatgtcgggattgctatggttgtctacttagccggtctgcaaagcattccgaaagactactatgaagcggcgcgaatggatggcgcgaaacaaggccagcagttttttaccatcacgctgccgctgttaatgccctccattaccattaatatggtcatcaatattatcggaggcttaaagctgtttgacgtcatcattgcactcaccgcgggcggtcccggaaatgcgtcacaatccatgtccacgtttatgtatgatttgtatttcaaacggcaggatgccggctatgccgcaacgcaaggcatatttatggcatttgtcattttgatcatcagcttttgcgcgcttgcgtactttaaaagaaaggagacggaaatgtcatgagagccgtccgtacaaaaaacatgcggatcattacgcttcttgccgccattgtggcctgtgcgcattttattcctttttatatcctgctgaccacttcattgaaagcaaaaggagactacagttcgaaatggatatttccagccaacatctcctttcacaatttctcagaggcgtgggagcgcgcttcgctaggtaactcttttataaacaccatgatcatcacaggtttttctgccttgttattaattatattcggctcacttgccgcctacccgcttgcccggagggaaacgaaactgaataaagccgtttttgccttgctgatttccattatgatcatccctccgttaacgtccatggttcctttgtaccgaatggtcgtggacgccggaatggtcaatacacacgcaatcgccattttcatcaatacagcagcttacatgcctttaaccgtattcttatattcaggctttatccgatcgaccattccaaaagagcttgaagaagccgcaagaattgacggcgcaggcatgctgaaaatcttttttacgattgtgtttcctctgctgaagccgatcactgcgaccatctgtattatttcttgtgtctttatttggaacgactatcaatttgccattttctttttacaagatcaaaaggttcagacattaacagtcgccatggcaagtttttttggagaaaacgcaaacaacctgcatttagttgccgcagcggcacttatggcaatgctgccgatggttgttctgtttttggcgctgcaaaaatactttattgccggcctgtcttccggagcggtaaagggttaacattaaagggggaagcaatatgaaaaagattacatttatcggtgcagggagcacgattttcgccaaaaatgttttgggagactgcctgttaacagaggcactgaatggatttgagttcgctctttacgacattgatcccaaacgcctgcaggaatcccagctcatgctcgaaaatctaagagaccgttataacccaagtgtggccatcaacagctatgatgacagaaaactcgccttgcaaaacgcaggctatgtcatcaatgcgattcaggttggaggatacaaaccgagcacagtcatcgatttcgagattcctaaacggtatgggttgcgccagacgatcgccgatacagtcggcatcggcgggatattcagatctctcagaacaatcccggtcttatttgatatcgcaaaagatatggaggaaatgtgccctgacgcatggttcttaaactatacaaatccaatggccactcttacaggcgccatgctccgctataccaatatcaaaacaatcgggctctgccacagtgttcaagtgtgcacgaaggatttatttaaagctctcggaatggagcatgacggaattgaggaacgcatcgcaggcattaatcatatggcttggcttttggaagtcaaaaaagacggcacagatttatatccagaaatcaaaaggagagcgaaagaaaaacaaaaaacaaagcatcatgatatggtgcggtttgaattaatggataagttcggctattatgtcacggaatcgtccgaacataacgcagagtatcacccatactttattaaacggaattaccctgaactgatcagcgagctgcaaatcccgctcgacgaatatccgagaaggtgcgtcaagcagattgaaaattgggagaaaatgcgggatgatatcgtcaataataaaaaccttacgcacgaacgctcaaaggaatatggttcaagaattatagaagcaatggaaacaaacgaaccattcaccttcggaggaaacgtcttgaatacagggctgatcaccaaccttccttcaaaagcggttgtggaagtgacatgcgtcgccgacagaaaaaaaattacaccgtgcttcgccggagaactgcctgagcagcttgccgccttaaaccggacgaatattaatacacagctgatgacaatcgaagcggctgtcacacggaaaaaagaagcggtttaccaagctgcaatgcttgatccgcatacaagcgcggagctttccatgaaggacatcatctccatgtgtgacgatttatttgcagcacacggcgattggcttccggcatacaaataaaaactaggggaccgctctcccctagttttttggttttgtttcgccttcccaggccatcatgccgccttcaacattgactgttttaaagccttgctcatccaggtacttgcagacgttcatgctgcgcattcctgagcggcagataaatacgtactctttgtctttatcaagggtttccattttttcaggaatatcccctatgcgaatatgaacggcttgcgggatcatgccttccgctacctcttcatcttctctgacatcaattaaatataattcttcgtccgcctcaattttttctttcaaagcggctgtgctgatttcttttatttccaaagaaaacactcctattcacagtgatcatgttcagtatatcaaagtcagctgaacgattgctattctgagactgatgaaaaaaatccccttttggcaaaggggattttttctaggcttagtttgccacaatattgacaagcttgccaggcaccgcgatgattttccgaatcgttttgccttcaagctgctctttgaccttttcatctgcttgagcaagctgttccagctgttctttcgttgcatcggcaggaacctgtaatttcgcttttacttttccgttcagctgaataacgatttcaacttcatcatccacaagttttgtttcatcatatacaggccaagcttcgtaggcaattgtgccggaatggccaagcttctcccaaagctcttccgctaagtgtggcgcgacaggagaaagaagcttcacgaagccttccatatattctttcggcagttctgttgctttataagcttcattaataaagaccatcagctgggaaatacccgtgttgaaacgaaggccttcataatggtctgtgactttcataaccgtttcatgatagacgcgctccaatgtttcacccgcgccttcaacgattttgtcattaagctcaccgctgtcttcaataaataggcgccatacacggtcaaggaaacggcgcgcaccgtctaatcctgattcagaccaggcgattgaagcatcaagaggtcccatgaacatttcgtacaatctcagcgtatcagcaccgtgagaggccacgatttcgtcaggattgacaacgttccctttagatttactcattttttcgttgttttcgccgagaatcattccttggttgtacagcttttggaacggttctttcgtcggcactacgccgatatcataaaggaacttatgccagaagcgggcatacagaaggtgaagcacggcatgttctgcaccgccgatatacatatcgaccggaagccatttttccaatttttctggtgatgccagctgatccggattgtgcggatcaatatagcgcaagaaataccagcagcttcccgcccattgcggcattgtattcgtttctcttcttccttttttccctgtctcagggtctgtgacttccacccactctttaatgttcgcaagcggtgattcgcccgttccgctcggtttgatttcatccgttttcggcaaaatcagcggcagctcctcttcagggacagctgttgacgttccgtcttcccaatgaatgaccggaatcggctcgccccaataacgctggcggctgaagagccagtcacgaagacggtatgtcactttcttctcaccgtttttcgtttcttccagccaagcgatcactttttcaatcgcttcctgtttgtgaaggccgttcaggaaatcagagttcacgtgctcgccgtcgccagtataggctgcttcctcaacgttccccccttttacgacttccttcaccggaaggccgaatgttttggcgaattcaaaatcacgctcatcgtgtccaggaactgccatgacagcacctgttccgtatgatgcaagaacataatccgcaatccaaatcggcagtttttctccgtttacaggattgatcgcatacgctcctgtaaatacgcctgtctttgttttcgcaagatctgtgcgttctaggtcactctttgattgaatttctttgatataagcttcaacagcttctttttgctctgccgttgtgatgttttccaccaatgcgtgttccggggcaaggacagtgtatgtagcgccaaacagcgtatctggtcttgttgtaaacaccgtaaaggaatcatcatgtccatctatagcaaaatgaacgtgagcgccttccgaacggccgatccagttgcgctgcatatctttaatgctttccggccaatcaagctcttccaagtcctcaaggagcctgtccgcataagcggtgattttcagcatccactgcttcattgggcgtctctctaccggatggccgccgcgttcgctcttgccgtcaatgacttcttcgttggcaagaacagtaccgagcgcagggcaccagtttacaggcacttcgtcaacgtaagcaaggcctttttcgtatagctttaagaaaatccattgcgtccatttatagtattcagggtcagtcgtattgatttcgcgatcccagtcatatgagaagccaagcgcttgaatttggcggcggaagttatcaatattctgcttcgtaaacacagcggggtcgttccctgtgtcaagcgcgtattgttcagctggcaggccgaatgcgtcccagcccattggatgaaggacatcatagccctgcatgcgcttcatgcgggacagaatatccgtagctgtgtatccttcaggatggccgacgtgcaacccagctccagacgggtaaggaaacatgtccagcgcgtagaatttttgtttttcattattatcaagagtggcaaatgttttgttttcaagccaatatgtttgccatttcttttctatctctttgtgctgaaaactcaaagtaaaaacctccttctgattgaatacggcgtgtatggttcaagtattgacgggaaggagaggattattcagaatattcccaaactaaaaaaaactccctcatccctaaaagggacgagagactttcgttttcccgcggtaccaccctcgttagcgcggcatacgccgcactcacttgatacttttaacgcagttatgcgtcagcggcttttcaccgctgcaactctgaggtgagttcggaaacaaacttgattgactttcaccagccgtcaactctctgcaacaatatctgtttcttactgctcctcttcattgttcttatcgcaaccgtaatctaactgtattttatagaattctgttcataagtgcaagcaggtttgtatacaatgggaatgtaccctgaacgggcggagattgaggacaattattcgggtggagttttggtttgacgtttggactcggccggttcgccgccgctgttcagttctctcacaaagtcaaaacttctgagaacagcttcaccgccgtagcctgagataatggataagatgacaagttgaattcctgaatcggggtcagcggataatacaagtaaaatggaagccgtcatgccgataaaccaatcttccaaaaatccaaggtagataaaccgcttcgtcattctgggcttctccagcctgcctctctttttcacatgaccgagaatccccatgattcctccaattacacaagcaatgagtacctgatgcagcatcttcatcatcaccttcctaaagcccttatttcgtaaagcgacttcaggccatccagcccccttaaacgattccgatgattttcgatatctacataccggcaaatctgtaaaaagcttgtttcttccattatatgtgaacacatgatcggtaagcttgatgcattggattcatttttcacccagtgacattgacctagtcacctatttagcatgtaaaaaacctttccgttcatatgttcaaattctgttcttatttttagtgtatacgaggacaagccctaatgacaaacaacaaactgcacttgcttgaatcagaacatgtgttgtgctacggttactgtagaattcattttaaaaaggggaatatcaggctttcgcatagcaagctgacggcctaagggggatttatatggctagttttcaatcatttgggataccaggacagctggaagtcatcaaaaaagcgcttgatcacgtgcgagtcggtgtggtaattacagatcccgcacttgaagataatcctattatctacgtaaatcaaggctttgttcaaatgaccggctacgagaccgaggaaattttaggaaagaactgccgcttcttacaggggaaacacacagatcctgcagaagtggacaacatcagaaccgctttacaaaataaagaaccggtcaccgttcagattcaaaactacaaaaaagacggaacgatgttctggaatgaattaaatattgatccaatggaaatagaggataaaacgtattttgtcggaattcagaaagacatcaccaagcaaaaagagtatgaaaagcttctcgaggattccctcacggaaattactgcactttcaactcctattgtcccgattcgcaatggcatttcggctcttccgctagtcggaaacctgacagaggagcgatttaattccatcgtttgcacattgacgaatatcttatcaacatccaaagatgattatttgatcattgatttatccggattggcccaagtgaacgaacaaacggccgaccaaattttcaagctgagccatttgctgaaattgaccggaactgagttaatcattaccggcattaagcctgaattggccatgaaaatgaataaactggatgccaatttttcgtcgctgaaaacatattcaaatgtaaaggatgccgttaaagtgcttccgattatgtaaaaagatcccgctcacccagcgggatctttcagattgttgacaaaatcctaaaatggttttcattttaggattttgtcatcttttcagcgtgattgaaaacccttgaagtctaggaaggacgagcataggagcggagcgaatgttctaattcgtgagcaccgaagcgcaggcctgacaacgaatgcgagggtttgtcgacacgctgaaagatcccgctcatccggcgggatcttttattatgaagagattgatgcctgcttatttgtttctttagctgattttatccgtttgtcatatagaagcgttgtggcaatactgatcagcagcaataccaacagagataaaacaagagccctaatgccgtaatgatcgacaagcactcctccgaacaggggaccaatcattctgccgcctgtcgccgcactgttgacaaagccttgataaaagccttctttccctttaggggcaagctgattggcaatagtcggcacagcaggccaaacaagcatttctccaatagtcaggatcaccatcgcagcgagaaacatcggaaattgctttgcagtcagcagcatgctgaaagacacaataaaaatgataaagccgatgaccatttgcgcttttagcgactcggcccattttttcaccacaaaactgacgagcggctggccgagcacaatgagaattccgttaaccgtccacagcacgctgtataaggaaagagatattccaatgctttgtgtgtacgaagcaattgtggttgaccactgagaataagccagccatccgagtacatagcctccgcttaaaatgatcagtgcggcaaattttgctttgctgttcacagcatcgtaatcaagcacagacgtttgggacgcatctcccgtctgaatatttcgaaatccgaaatatacaataaagaaaaagaccagatacagcgcggcattcgccaaaaatacatatgaaaacgagaaagacgccacgacaccgccaagcgctgaaccgacagccacacctgcgttttgcgcgacatatatcgcattaaatgccttccttcccccttcaggccataccgatcctgccattgcgtagctggccggaaaaacaacaccggagccaaagcccacaatcgtcagcagcacaatataggctggccaatcatgaaaaaagacaaggcccatcaggcttgctaacgtaatggctatcccaagcataatcgatttaaaaccgccgattttatcaaacaaaaaacctccgcataaattgccagccacactggcgccggaattcagcatcaggacaagtccggctactgttaacgactttcctaaatgattatggatataaatcgtattcagcggccataaaaaagaagcacccgtcacattgataaacattccaatgactaaaattttaagagcacgcggcatactcatccccctttcttacctaaaaaagctcatgaaaaaaacgaaacctaaaacggctccgtacgaatccagttatcatagcacattcattctatctgtctctctcacatttttcaactgatgagcgtgaaaaaatctaacaaatattgtttgaaaaatgtaaaataaatagaaaaagggggcatattatggaaatggcattagcattcttaggttttctggcatgtctcattgcactgggctatggattatatcactttgtcagatatgtactgaaaaaggaaaaacgtttctccaagagacttttttggccgcttttcattggaggccttgtgctgctctttaccggagcagcattggcagaacctgacacttccgcagcaaatgccgagaaaaaatattcagcgctaaacgccgaatacaaaaacctcacaaaagagcatgaagaacttgagaaagaatataaatctgtcagctctgaagcaaaaaaattaaaagacaacaaagaagatcaagacaagcttgagaagcttaaaaacgaaaatagcgatctaaaaaagactcagaaatcattaaaagctgagattaaagagcttcaagaaaatcaaaagcagctcaaagaagatgcaaaaacgacaaaggctgaaaatgaaacactccgacaagataaaacaaagcttgaaaatcaattaaaagagacggaaagccaaaccgccagttctcatgaagacactggaagttcttcaaacaatacgagtaaaagtgatgaaaccaaaacagctgacaaagcagaaggctgtaatatcaaaggaagcaaaaacggcatctaccacacgccaggcagtacatactatgaccggacaaccgatccggctgaaatgttttgctcagttgaagaagctgaagccgccggttatcgggcgccaaaacgataaacaaaaagctccagtatgtctggagctttttctgtttcacaacgacgatttaatgaccttcttataataaagaactgacagaaaaccaaaaatggagtagagcgcagtatataacaccatcaccataatcatgggcgcccatatctctgatccgaataagaaccagccggattggacggcaaagtaactgtggaagagcccgacaacgagcggaatgccgaagttatacatttgtttgatgcgtattccctttattaggtcgccctgcgtaaagccgagttttcttaaaatcgtatagctcggtttttcatcttcactttcacccatttgtttaaaataaaggatacaacctgatgtaatcaggaacgttaaccctaaaaagccgacgatgaacatcaccataccaaacagtgatttttgcgcagcgcttgtatccaatcttgataaatgctcgtttttcttgttcacctgttgaaaaagctcatttgctttttccatttgatcttcatgtttcacattgacgccgataaatgtagattgcgccagctgaattcgggggtctttatccttgttcagctgtttaaacaggctgtcatccacaatgacagcgggcatgcccccgcttgtaaacgtgtaggatacaagaaactcttctcttaatcctttatattttaatggctgcgtctcatgtttgctttttactttaataacaccagagtccttgaaaaccattattttttgcagcaagtcggtgtatcctgagaaaacggcttctccagccgccacatcgactccttttacatctttgtcgctaacaacagcaagctgcatattgctgggatcgccctgcatctctttcggagttccatccataatatttgcaatgtcaacatttgcttgcaggacaggtgttgccttttttacaaacgagatgttgctttccctcaatttgttttcaaataacttggcatctttctcattcatgaatgaaaaatcagccgctacattttgttcagcggtcttttccgacgagtaatacgagatgtaagcaagagataacagcccgatggcgagcgctgaaacggttgtaataatcgtcagcagcagcgcattcgatttcattctgaacatgatcgatgacagtgacagaacctcagaaatatttaagtagccgcccttgctttttcgaatgatattcgagataaacgtaactgatcctttataaaacaaaaacgtcccgataatgacgctccccagaatgaagctcatcgcaacaaacagttcattaatggtcttaaattttccgccaaacagctcagaagacacatagtatcctgtcaaaatcaacacgatgcctaaagcgccgatcagcatttggaaaaatgatattttcttcactttgtcttcagtggaggacgttactttaaacaaagataaaatactctgttttttgataaacgtataattcatgatcatgatcaaaaggtaaatgccgcagaacacaatgaccgtttggaccaaggcctgctcagaaaaatgcagtttcgcatccgctttgacatcgacaattttgaacagaatcatcaagacaagcttcgatatcgaaaacccggccgctaccccgatcgctaatgaaccgaaatacagcatgacattttctgcacttaagatgcgaaaaattttatgcttcgtcattccaattaattgaaacagcccgatttctttactccgtctcttaataaaaatcgtattggcatataaaatgaagatcgccactacagccacaagcaaaatcgaagcggttttaatagccgcggctcccttgattgaagccttcacttcgttaattgctggatcatactgcagcgtgacaaaggcgaaataaagcgccacgctaaagatgagcgcaaacacatacaaatagtaattccggagattctttttcaaatttcgcaggatgagctgattaatgttcatgctgcaccccgcctaacacgccttgcgttttcataatatcctggaaaaacgtttgcctgtcctggccccctttattcagctgtgtatacatttgcccgtccttaataaaaatgactctgccgcagtagctggcagcgacgggatcatgggtaaccataataatcgtcgcgttgcgtttttgattgagctggctcagcttatttaatagatcggaggccgatttcgaatcgagcgcgccggtcggttcatcagcgaaaataatgctcgggtcatgaataaacgctcttccagcggatgttctctgcttctggccgccggaaatttcattcgggtatttatcccgcaattcatatattcccagttcctttgcaacttcctcaaacttgcgattggcttccttttttgatagtttcgtgatcgataaaggcagaaggatattctctttcactgtcaatgtgtctaacaaattgtaatcctgaaagataaagcccaaatgctgttttctaaattcagccagctgcttttccttcatagccgtcatgtcatttccattaatatgaatggttccgtgactgacctgatcgattgaggacagaacgttgagcaaagtggtttttcccgacccggaagcacccataatactgacgaattcgcccttttcaatgtgaatatcgatgcccttcagcacttcctgtttattcagcttgtttccataactttttcgaattttattcgcttctaaaatcaccatttacgcagtctcctttatattggataatctcattataaaaaggaatgccgggcttttccttcgatacggcgaacaaaaaagaaaagcatgtgacattttcgtcacacgcttatgacatgttcaaattgattccgtattggaaaggttaatgtaaaaactgttcccgcaccaaactccgactcaacatcaatatggatcaataacggcgccgctgctttttttgccaagtacagccccatgccagttgacgcttgatcatggtgatccgttgtggatgtaaaccctttatcaaaaatacgcggtacatcttttggatcaatgcccctgccacagtccttcacttggagctgcgtctgttcccctttttgaaaacttttgatctcgatttcagaggcttcgctgtatttcaccgcgtttgtcagcagctgcctgatgataaacgccagccattttgcatcgctcagcacttctttggcctcgagctgtatgtcaaaaccgatccctttttggatacaccacgattgcaaatctttgatttctttaaagatcaaaggctgaagctgaatgaattctacagacagatcgttttcaataaatgatatccgtttttgatgaagctgctgatcaagaagcagatgaatacgcagccattcatatgacagctgggatttcagtgctttttcttccattctatcaatgattaaatgcatcgctgttaatggagttttgacctcatggatccatgccatcagctcatctttttcattttccaatgctaagcgatgccgtgctgcggtctgcttcaagtgttctgtttgcccggcaatgcttctttcaaccattgcttcaaacggcgtttccggttcatttatggctgtcacatcgagattgttctcccatgttttcaagcttttataaaacgctgtttctttccgatagcggaaccaaaggaatatgataaaaaacaaaatgcacaaatacaccatataaagtacattcccaaatgatatggaaggatcgacaaaaacaatgaacagcatcaaagcctgctgaaacaaaaaagcggcaatccagctccgcctttcgataaggaatgctttaatcatagaacttgtcctcttccttcgcgatgtagccctggcccacctttgtctcgatatatgcaccaagctgcagggcgtccagtttttttcgcaggcgattgacattgacggtcagcgtattatcactaacaaaacgctcatcgttccacaagcttctgatcagctcttcccggctgacgatcttgtttttttgctctattaattgttttagaatgaacatttcatttttggtcagttcaacagatcctttgtcattgctgacgaggttctgctccgcgtctacagcagcgccgcaccacgttttaatcgtattcggctccgtattataatggtgcacacgccggaacatcgcttggattttcgcaatcagcacatcaaaatgaaatggcttttggataaagtcatctgccccgagctgcatggacatcaccatatcagcaggatgatcccgggaggataaaaagagaatcggaacatttgaccgggagcggatcagccggcaccaatgaaagccgtcaaatttaggcagctgtacatcaataatgacacaatcaggattaaccgccgcaaattcctgcagcacctgactgaaatcctgaatgccgtatacatcataggaccatcccgttaaacgatccttgatttcatgaaacagcgattcatcatcttcaatcagcaaaagtttaaacaatcaactcaccgcactttttccttttttatcaagtgtatagcaaaacgctatcatgcgctatagaaaaagccggctgtctcagccggctcgttcgcattatagttctcttctcaacgctgtcagcacgttggtttttgttgcttttctcgccgggttcattccggaaatgactgcgacccctccgcaaatcacaacggcaatgatcacaagactcgccgggatgtaggagaatgtgtaattcaagtcgcccgcatcgcttccgcttgtggccgcaagaatcatcggaacggccaggttgacaaggtagctcacgccgtaagaaatgataatcccaatcacacagcctaaaattccgatatacgcgctttccatcaagaacattcggcgaatgattgacgggctcgccccaatcgctttcataatgccgatctcttgcgttctctctgtcaccgccatcgtcatcgtgttaaaaatgccgatcgctgaaatgataactgcgatacatccgacaaagatcagtccgattttgaagaccatgaagaaggtattggctccctcaagttcagtagtcactgatgtgacatagtacccgtcatctgttagatcatttgtcagctgttccacattctcaaacttatcagcaaaaacaccaatgttcgtttcaacatttccgcctttgaaatctaagaattccgaaaaatcttttttgaattgatcactgataaaaatgtttgagtcctccatccagtcttgagatggtttttttgtaataccgacaattttaaagtcatatgtttttgtttttgtaacatcccctgttttaggatctgtcttcgatacacttagttctattgttttgttcagaatatctttcgtatagccctttggttcttttatatcttctggatttccttttgcttcttcgatttttttgttatattcttccgattcttttttcgtcaataatctctttgcgaagtcgtatcctactacgatttcattttccgactttgcgactcttcccttttccaattccatattggcctttaattcatcattcatattagtaaaaatgagatttgagctttcatttgtacgattgcctaaagtagctttgtttggttcatacacttgcgttctttctacaactgaccttacgtgatcatacttctctaaatcagcttttttaataggcttgtctccttccttgcccattacactgactttcgttacaatctgctggctcattgtcatatctgtaattgtcttttgaatcccaaatccaacggacgacaacacaaccaaaaacgcacacgccattgttgtcgccagaatcgtcataaagacgcgaagcctgtttttcttcatatttcttctgataaaatgaacctgatccttaaacctcaacggtaattcctccttttagcacaccatcatgaagctgaaattttgaatgtccgatagaagcgacttcatcatcgtgagtaatgatcacaaatgtaatgccacgctcacgattcagctgctggatcaattccagcacttcatgttccgtttctgaatcaaggcttcccgtcggctcatccgctaagataatcgaaggatttaaaatcaatgctcgagcaatactgacacgctgctgctggccgcctgacagttcattcggataatgagcggcgtggttttccagaccgacgcgtttcagcatgtcctgcaccttttgcttccgctcagatggcttgattccttttaacgccagcggcatttccacattctcatacgtcgttaaacccgggatgagctgaaagctctgaaaaataaacccgaaatggtcaagccgaaattgcgcccattccttttcattaaaccccgtaacatcagtgccattaatgacaatccgcccttttgtcggcgatatgtagccggaaattaaattcaaaagcgttgatttccctgagccgcttcgtccgacaatgcaggcgatttcccctttcgccacgctcaatgaaacatccttcaatactggaacttcattctcacggcccttttttccgatcgtgaaagaatggtcgatatgctgaacatcaatcatatgttctctctcccttacaaaagtttcattttttataaatcgcaaaataactaatcaagaaaccgattaccgcacctgtacccatgccaatgagataaccggcaaagctctcgcttgcagtaaatccaaaatagccgaagcccatgattcctatgataataacgatgatctgcaccgggcggttaagcggcttccataagaagaaatatccgtttctttcattagacattttaacaaagctaatatagccgatgatgtaaaaaatgatagtcatgatagccggaatgactaaataatatggtgaattctcagcccatttcgagtctacataaattatcggaatgaaatactgcacccatttaggtactggaccatggataaaatctattgatccgccaaaaaggatctcgaggttgatcgcaggcaggctgatgagcaaaaatggcgaaatggccacggtaaatgagactagaagctgtgcgaaactattgcctgtcaaagctccacccgccataacaagcgaataagccagcatgctgacaatgatcattccaaggctgtaattgtgaaaataaacggcctgatcaggcttcaaaagtatgatcagcaaaacagataaaacataacctatgagctgcggtatcacaatcaccattccgccagtaaggaacttcgcatgaaatatctgccctcttgtatacggaaggcttaatgtaaaatcaaaaaagcccttgcttcgttcaatccctagctggctgaccgccaaaacgactccccaaatccaaaacaatgagataaatgagctgtttaaataatcaacgctgaatacgcaggggccgacccaattttcttttccagtgacacagccttgatagatgagatacatatttaaaattgataatggattacccaatataaaaaccaaaatggtgataactaaggcgactttattctgccgccactctttgtaaagcagtccggaatccggcaactcacttccctccaaacctatggcatttcttacacttttgttttcttataaatagagaagtagctcacaaagaatccagccactgccccaatgatcatacccaaaatataaccaataatggaatgtccggtatagtatccaaataaaccaaatccaaggatgccgaaagccataaccagaatttgcaccggacggtctaatctgttccataagaaaaagtgtccgtttcgttcacttggaagcttcttgaagcttataaagccaatcaagtaaaatagcatgctcattacggctggaatcaataaaagatatttactgttaatcagccattcatttacaacgtaactaatcggtactaggttcgataaattgcttgccagagagaaataactctcaggggaagggaatatttcccatatattcgcaccaaaaacaacttctaggtttccaaccggcaatgcaataattaaatacggcaatatagctgctgaaaacgccgttaacagttgggcaaaagcatttccagttaacgctccggcggccatcaccagtgaaaaagccataaaacttatcacgattactccaatgctgctgtgctcaaaaaagtagacgtgttcagggttatagacaagaatcagcagccatgcaagtaaaaagccaatcaattgtgacagcacaatcacaaaaccgcctaaccaaaattttgtctgaaaaatttggcttctgttatacgggaggcttaatataaaatccatcgtgcctttcgaacgctccattccgaggaagcagaccgccaaaatgacacccggcacccagttgatatctatcagattgcttatggaataattcacaataaaatcacaatattgcgggtcttggcgatcaagacacccttgataagacaaatacgtattaacgatagaaagcggatttgccaatactaaaaacgcgatacttaacaaaatcaccacttgattctgcttccactctcgatagaggagacctcggtctaccatctccgcttccctccaaacttcgcaatgaacacttcttccaggttgacaggaagctcattccacacttttggcttcagctctctcaaaaagctctttttctcctcatcgcttttcggaatcagcactgtgtaaaacacgccggcctgatcgagcatcggaatgttttgctctctgatggccaaattgacatctgtatcgaaggccatttgaattttaatgtattcttcttttaactcatcaagatccatgacgttggtcaggctgttatcttcaagaaaaccaattcggttgcacatccgctctatgtcttcaagccggtgggacgtaatcaggatgctcgtatcacgctctgccacttcatcgaccatcagctgcagcacatcatgccttgtcaccgcatcaataccatccgtcggctcatcaaggaggatcagcgccggtctcgccgcaaacgacagaacgagcgatagctgcttttttaagcctgtcgacagctcacggtattttttcgtttccggaatttcgtatctgttcatcagctcattcgcgtacgtgacatcaaatttcggatatattcttctcaaaatatcgactaactgcttgtatgtatacttatcgtaaaacggattttgaacaggcatgtagatgatattttgtttgactttcgggtgctttttgatttctacgccgtcaaataaaatcgttccgctgtcagcgaaaatgatttgctggattaagcgaagcatcgtcgttttgcccgatccattgcgtccaagcaatccaaagatttctcctttttcgattgttaatgaaacatcttttaatacttgattgccgtcaatcgcttttgacagctgccgcagttcaatcattttttttgcctcccttcacatcagcgctgatttcctttatccattcgtgcagtttttccagctcaacccctgcatagtgtgcatcgatgatgagctgtttgagttgctctttaatcatcgtcatcttcccttcaaccagtgtcgtttttgcattctccgatatataggtccctctgccccgcagcgtttcaataatcccctctcgctcaagttctttatacgctttgctgacagtgttcggattcgcaataatgatcgttgccaattctctgacagaaggaagcttatcaccaggcttcatgatccctttcaaacaaagctctttcatttgctgaataatttgttcgtaaatgggtgttgagcttcttggatcgatttgaatcatttacttccctactttctatacgatctgaaccttttatagataaaaatgatcaattatacttttttgccattcaaaaccgatcatcacaagaacaagaaaaaaagaacaagcgatcacagatgccgcaatcagcattggcacgttacgtttgtttcgttttttatgtttcataactgcctcccttaatgtcaatatataaatgattttatattagtgtctatagtgtattacttcaattagtacacttaatacaataaatactttgactcacaaagtcaatcctttttttacaaaaaaacggacccttttaaaagggtccgttttcctacacatcaagagggtgctgcaggatcatattattttgcaaagattgaagctgaagtctcattctgtacagctgttctctctgctgatcatttgacgacagccatagtttattcaaggcatttaccgcatcttctagctgcatttgtgcatcactatattcttgatcgttataatgctcttgtttagaagcgattttcagctgttcttcagcataatcataggcctgcatacattgctggagatgttcatctactgattgtcttgttgccacagtaacccctcctcttggtaatggaaatcatccatcattcatattgtagcctcatctgactttattcaataaagtaatttatggtcgatattcatttgttctcttgtgaaatgcgtgctacaattttaggatgcaatcgtacgcaaggaggcacatgaattgtgatacagaacaatccttttccttattcaaatacggaaaaacgctatcatacattgaattatcatctcagagatcatttcggccataaggtgtttaaagtggcgcttgacggcggctttgactgcccaaatcgggatggcaccgttgcccacggaggctgtacgttttgcagcgcagcaggctccggcgattttgccgggaaccgggccgatgatttaattacgcaattccacgacatcaaaaaccgcatgcacgaaaaatggaaggacggcaaatacatcgcttattttcaggctttcacaaacactcacgccccggttggggtgcttcgcgaaaaattcgaatcagtgctagcgcttgatgatgtggttggcatttcgatcgccactcgcccggactgtctgcctgatgatgtcgttgattacctggcagagctgaatgaacgcacctatttgtgggtggagcttgggcttcaaacagttcatgaacggactgcacttctgatcaaccgcgcacatgattttaactgctatgtggaaggcgtcaataaattaagaaaacacggcatacgtgtctgctcgcatattatcaatgggctgcctttggaagaccgggacatgatgatggaaacggcaaaggccgtcgcagatttggatgtccagggcattaaaatccatctgcttcacctactgaaaggcacgccaatggtcaagcaatatgaaaaggggaagctggaatttctttctcaagatgattatgtgcagctcgtctgcgatcagcttgagatcattccgcctgaaatgatcgtccaccgcattacaggtgacggaccgattgagttgatgatcgggccaatgtggagcgtcaacaaatgggaagtgcttggcgccattaataaagagctagaaaatcgaggcagctatcaaggaaagttctttcagcggcttgaggaggaatcagcgctatgattttgaagaaaattcttccctacagcaaagaactgctgaaaatggccgcgggagaaggagatattgtcgtagatgcgacaatgggcaacggacatgatacacagtttttagcggagcttgttggtgaaaacggtcatgtgtacgcattcgacatccaagaatcagccgtggccaatacaaaggaacggctcggtgacatgtatcaagcgcgaacaacgttatttcacaaaagccatgataaaatcgctgaatccctcccgcctgaaacacatggcaaagtggcggccgcggtatttaacctcggctatttgccgggcggggacaagtcaattacgacaaacggcagttctacgatcaaagcaattgaacagcttctcggcatcatgaaagacgaaggtctgattgttctcgtcgtctatcatggccacccggaaggcaaagctgaaaaaaacgacgtgctcgagttttgccgggacttggaccagcaaacagcccgtgtattatcatacggatttatcaatcagcaaaatgacccgccatttattatcgccatcgaaaaaaaagctcagatcagcaaatgatttgagcttttttctttgagtttttcatccagaacattttttgaaatttccggtaggctctgccgttgatataaaagaaaagggaggtttttccgctggctttgatcagcttctttgcgagccggcccatttccttttggcccgccactttatcatctgacaaataaacgccaagcaagccgcgattgattaaacgatggaagttttcatgcggaatgccttgtaaatgctcgtcagctttatggataaagtgttcaagccgattcatcatctcttcatgagactgataatacgagcagaaattcaagtctccttccagcaagtcctcctcttgatcaatcaaataatcaagaagaatatgaaggccctgtatgtaaggaaaataactgtcgcggatttttttagcggtgctttctgtgaaatcaggctggaacgaatacgcaaccagacagaaaatgcctaacgttgagcctgcacaggctgaaaattcataccattccatctcaggcagctctgattcatattgagtaaaccacttttcaagccgcggaacacgctcatgctcaataacgtgcttatgcacctgcaaatcgcaataatagccgcacagttcaagcagataaggtttaatcatgtcatagtgctcaatggagccgagaacacgctggcacgttttgaccagttcatgcaaatatccgctgtcatcctgttcttccctgaattgataatagttttgcagttccgccccaactgtcagtgcgtcctgcattgaggcatggagcatccgaaaatcctgcgggtccagcgaggtgctgcggtcacacagattgtccaaataatcactaatcgtttgatacgcgatgataaactcgacacatttctgtttttggctgcctgacaataaggccagtatgccgccgccttcacagtgaaacgttttgtcccgaatacttgcggttgcctgtgctttcaattcactgttatgaatcgattctgatttttgcttccatatgtccagctcttgatgaacgagcggaaaaatatctcgatatacctttgccatcaatccaaaaggatgttccggtactgtcaacacatgcaccccctactagttcaaatatattgatcagtaaacgctcttgctgctttaaaaacatcttctctctcgggttcattgaagatctcatggtaaagcccttcccactctctgtatgctttattataagaagcaacaccattaaaccacttgatgaccatcgttttgtcaacaagcttgtcatcaccggcttgcatcacaagaagcggaactttcaaaaatgcctctgtcggcaccattgccgattcaattgtctttaaaagctctctgtaccatctgacagaaactttcctgacgtataacgaatcattttggtcagcctcaatgacgtcctcattgcgcgtcgccatatcaattgataatcccgaatcaaccttaagtgacggagcgatgacattcaggccttttgatgcaagatcaagcgctttattcactttaatttgcagtccgagacacggtgatgataaaataattcccgtaatcttgggatttctttgctgtttaatccattcaatcgcgaccagaccgcccatgctgtgacctagaagaaaaaccggcagatcaaaggttcgcgctttatctatccaagcatctacttcatcaatgtattcttgaaacgagcgaatatgccctctcgctcttgtcgttgttccctgtccaggcaaatcgcccatgacaacgtgataacccgaagaccgccacatttcaatcagccatttatatcgtccatgatattcacttgccccgtgaatgattacaatcacggcaacaggtctgtctgctttccaggtccacatgatcttcacctcatacgaaatttaaatagagaaagaaggatgaatcttatgatctacccttataaggaacacaagccagatatccacccaacagcctttatagctgataatgcaacaattaccggtgatgtcgttatcggagaacagtccagtatttggttttctgttgtcataaggggagatgttgcgccgaccagaatcggaaacagagtcaatatccaggatttaagctgcctccatcaaagcccgaacaagacgctgctcattgaagatgacgccacgataggccatcaggttacacttcatagcgctgttatccgcaagaacgccttaatcggcatgggctcaatcattttagacggagccgaaattggcgaaggcgcttttattggtgccggcagtcttgtcccgcccggaaaaatcattccgcctggccatctcgcctttggccgccctgcaaaagtcatccgccctttgacggaagaagaccgaaaagatatgcaaagaatacggtcagaatatgtagaaaagggccaatattataaatttcttcaacaaacataagacctgcttcgtcttactttaccatttttcaaattatatttgaaagcaataaccatcgttaacccggacgtcataacagttcgggtttcgatttttccataaaacgttcacatatagcatgaaacgtatgacttttatcttatcacaaaactataaacagcctctgcaaaaacacatacctattctttcctgttctctattttctatgagcacacacaaaaagagcccactgggagctctttttgtcagctgatatttcgttcgctggcagctgctgcattttttttgtgaaacccttttccatagtacacagccagcaagatgagaaaccatatcggcccgataatcacggctactcttgtatcaggactgtaagccataagaatgacaacgaatgctagaaatgccaatgacacataagacgtaaacggaaataaaggcattttgtactttaattgtttcttttcttcaggcttcaaacttttcctgtattttatttgagaaagcaaaatgattgcccacgtccaaatcgctccgaacgtcgcaatacttgtaacccaagtaaataccttcgcagggacaacatagtttaacagcactccgactaataaagcgcccgctgaagccagaacagctttacccgggatgccgcctttcgtcagctgaccatatgcttgtggcgcctctttctgttccgccaagttaaacagcatccgccctgtgctgaaaataccgctgttgcatgaagacagcgcggctgtcaacacgacaaagttaatgatacctgcggccgatggaatgcccactttttgaaatgtgagaacaaatggacttccttgagagccaatttcctgccacggataaatagacataatgacaaataaagcgcctacataaaaaatcaaaatccgccaaaatactgtatcgattgctttggctaacgatttttgcgggttttttacttcgccagccgtcaccccgatcatttcaatccctaaataggcgaacatgaccatttgaagagacaatagaaccccttttaaaccatgagggaaaaatcctccgttgttccacaaattgctgattccggttgcaatgcccccattgccgactcctgcaataatcatcaataaaccgacagcaatcatggataagatcgcaacaattttaatcaatgcgaaccaaaattccagctcaccgtaagctttgacagccaggaaattaacacccgtcataatgaccagtgccgataatgcccaaatccagtttggcacgtcaggaaaccagaaccccatatagatgccgacagcagtaatttcggccatacaggtgacaacccataaaaaccagtagttccaccctgttaaatagcctgcaagcggtcccaaataatcacgcgcatacctgctgaaggagcctgcgaccggtttttgaatggccatttccccaagcgctctcataataaaaaacatgaccaggccgcttgcggcatacgctaccaaaataccaggccctgctaattgaatagctgatgcggagccgaggaacaaccctactcctattgcagctcctaaagacattaaagaaatatgcctttcttcgagtccgcggtgcagctcttgtttttgtttttgcatgctttcttctcccctagaaaaaaattcattaaatcatttttctgaatatttcgtatgaattgggtaaaccaatgatgatggagaaataaaaggataacaacaaggctttcgactactcgaaagccttgttgtctgttacacaaagatgacttctttaggctgatggctcagctcttcaggcatataccgtttttcaatattgatgctgtgccagatcataaagattagcacagtccagattttacggctgttatcagccttgtccgcacaatggtcttcaagaagctgaaggacataatccttatggatataagcatccgtttggctttcctgaataatattccgcacccattcgttcatttcgtttttcagccaatgacggatcggtacagggaaaccaagctttttgcggtttaatacgtgctcaggcacaattccttcagcggctttgcgaagaagatacttcgtcgtgccgttcttcgttttcagctcatcaggaatttttgaagcgacgtcgaatacgactttatccaagaacggcacacgcagttccaaagaattcgccatcgtcattttatccgcctttaacaaaatgtcgccgcgcatccaagtgtggatatcgacatactgcattttgttgatatcgctgtacgagctgctttctgtaaagtaagtcttcgtcacatcgcgatatgaaaggttcggattataatgcttcaacagctgctttttgacagactcttcaaagattttagcgttaccgatataacgatcctgaagcggagtgcagccgcgctcaagcaggctcttccctctcataccttcaggcataacggcagcaacgtgcagaagcatctttttcaagccggacggaatccgttcaaacggtttaagcgaaagcggttcacggtaaatgttatatccgccgaagagctcatccgctccttcacctgataaagcaaccgttacatgttttttcgcttcttttgcaacaaagtacaacggaatcgctgccggatcagcaagcgggtcatcaaaatgccatacgatcttcggaagctcattcatgtattcctcaggcgaaatgactttgctgatattttcaatgcccagcgccgctgccgtttctttcgctacatcaacctcactgaagccctgctgttcaaagccgacagagaatgtttttaagcttggatgaaattccttcgcaacagacacaataaaggaagaatcaatcccgccagacaggaacgaaccgacaggaacgtcacttctcatatgaacgtttacagagtcatagatcgcgtctcggacttctttcacaagcttgtcttcttcagtctgaaccggcttgaagttcgctttgaaatacgttttgaatgtgatatcgccgtccgggcggattgtgaactgtgaacccggctctacttttttcacatgggcatcaagcgtgcttggttcaggaacaaattggaaagacatgtactgctgcaatgcctctttatctatttcaatatcattctgagcaaccattaaactttttctctctgaggcaaaataaacctgatcattgatcgttgtgtagtacaacggtttaatgccgaatggatctcttgccccataaagcacatgatcgtttttattccaaatcagaaaggcaaacataccgcgcagtttggacgccgcttcttctttatagtgacagtaagtcgcaagaagaacctctgtgtccgaatccgtgttgaatgtgtacccctttgcttcaagctcttctctcagttcaatatagttatagatttctccgttaaagataatccaatatgtttcatcttcatatgataaaggctgtccgccattttctacatcaataatgctgagccgtctgaatccgaagccgacgtgctcatcatggaaatatccatcactgtcaggaccgcggtgaacgatcatttggttcatttgtttgattagttcttcttgatcagcggtttgagctaacggatgcttgttaaaaaccccgacaaatccacacatagtattgcctccataattaaaattgtcatcattgaacccctatttatagacgctgtgaataatatttggtttcacagttatgtaaaaaaataaacatgaatacaacgataaaaaagggaaagccgcttaaccagtaagcggctataaaattattctcctaacgcttctttacgcagctgctccgctttgtctgtacgctcccaaggaaggtcaacatcgtgacgtccaaagtggccgtacgcagcagtttgtttgtagatcggacggcgcaaatcaagcattttgataatgccggcaggtcgtaaatcaaagttattgcgaacaacttcaatcagtttttcctcagaagcttttcctgaaccgaatgtgttgattgagattgacacaggctgtgcaacaccgatcgcgtaagcaagctgtacttcgcaagaatcagcaagctcagccgcaacgatgtttttcgcaacgtatcttgccgcataagctgcagaacggtctaccttcgtcgcgtccttacctgagaacgcgcctccgccgtggcgtgcatagccgccgtacgtatcaacgatgattttgcgtcctgtaagtcccgcatccccttgagggcctccgattacgaaacgtcctgtagggttgatgaaatattttgtttcttcatcaatcagctcttcaggaacaaccggattgattacatgttctttaatgttgcgctgaatttgctcaagtgtaatttcagggtgatgctgagttgaaataacaatcgcgtcaatgcggactggtttgttattttcatcgtactcaaccgttacctgtgttttgccgtcagggcgaaggtacggaagaatatcttctttacggacttcacttaggcggcgggctaatttatgggcaagtgaaattggaagaggcataagctctttcgtttcgttgcacgcataaccgaacattaatccttggtcacccgcaccaatcgcttcaatttcttcgtcgctcattgtgccttcacgggcttcaagcgcttggtctacgcccatcgcgatatcagcagactgctcatcaattgatgttaaaaccgcacaagtttccgcatcaaatccgtattttgcacgtgtgtatccgatttctttaatggtttggcgaaccgttttcggaatgtcaacatacgtagaagttgtgatctctccgcttacaagaaccaaacctgttgtcacagatgtttcacaagcaacacgcgcgttagggtctttctttaaaatttcatctaaaatgctgtcagaaatctggtcacagattttatccggatgcccctccgtaacagattctgatgtaaataaacgacgatttttactcatgatttgcttcctcctgcacaaggcctcccgaaagaccttgtatatatgatacggaactcgctccctcttatacaatgtacagttatattagagaatgttaattggcatatttatgaaataaaaaaaccttttccatcgaggaaagggtttggtctttgtgcctttcactcttatcgctcaaggaatcatacaaccttgcaacaggttagcaccttggttgtctcactcagttgaacataataaataacagagaaaccggttgctgggcttcatagggcctgtccctccgccagctcgggataagagtatccgctcaatgaaatatcttatcgtaaaagggtttgcaatgtcaatatgattcagaagaaataggcacctatattgagggaaaacaatggaaatgcacacacaaaaaacaataaatagtatagactatttgaaaatatatgttatactaattcacaattagcaaaacacaaaaaacgataaaggaaggtttcatatgaactcagttgatttgaccgctgatttacaagccttattaacatgtccaaatgtgcgtcataatttatcagcagcacagctaacagaaaaagtcctctcccgaaacgaaggcattttaacatccacaggtgctgttcgcgcgacaacaggcgcttacacaggacgctcacctaaagataaattcatcgtggaggaagaaagcacgaaaaataagatcgattggggcccggtgaatcagccgatttcagaggaagcgtttgagcggctgtacacgaaagttgtcagctatttaaaggagcgagatgaactgtttgttttcgaaggatttgccggagcagacgagaaatacaggctgccgatcactgtcgtaaatgagttcgcatggcacaatttatttgcgcggcagctgtttatccgtccggaaggaaatgataagaaaacagttgagcagccgttcaccattctttctgctccgcacttcaaagcggatccaaaaacagacggcactcattccgaaacgtttattattgtctctttcgaaaagcggacgatcttaatcggcggaactgagtatgccggtgaaatgaagaagtccattttctccattatgaatttcctgctgcctgaaagagatattttatctatgcactgctccgccaatgtcggtgaaaaaggcgatgtcgcccttttcttcggactgtcaggaacaggcaagaccaccttgtcggcagatgctgaccgcaagctgatcggtgacgatgaacatggctggtctgatacaggcgtctttaatattgaaggcggatgctacgctaagtgcattcatttaagcgaggaaaaggaaccgcaaatctttaacgcgatccgtttcgggtctgttctcgaaaatgtcgttgttgacgaagatacacgcgaagccaattatgatgattccttctatactgaaaacacgcgggcagcttacccgattcatatgattgacaacatcgtgactccaagcatggccggccatccgtcagcaattgtatttttgacggctgatgccttcggagtcctgccgccgatcagcaaactaacgaaggagcaggccatgtaccatttcttgagcggttacacgagtaagcttgccggaaccgaacgtggtgtaacgtctcctgaaacgactttctctacatgcttcggctcacctttcctgccgcttcctgctcacgtctatgctgaaatgctcggcaaaaagatcgatgaacacggcgcagacgttttcttagtcaataccggctggaccgggggcggctacggcacaggcgaacgaatgaagctttcttacactagagcaatggtcaaagcagcgattgaaggcaaattagaggatgctgaaatgataacagacgatattttcggcctgcacattccggcacatgttcctggcgttcctgatcatattcttcagcctgaaaacacgtggaccaacaaggaagaatacaaagaaaaagcagtctaccttgcaaatgaattcaaagagaactttaaaaagttcgcacataccgatgccatcgcccaggcaggcggccctctcgtataaaaaacaaaagccaagagcaattatgctcttggcttgttttaattgacggaatgcaaagaagtcagcttgtatgtaatgatggtccggccttcttcccattgaagcttctgcacttcagctgtgcctgacttttcgccaaactttgttttgcgtacatccattggaatctccatcggatatactcggtatccgtccttctctaacgtgaatatattttcatctatgcgaacttcttttccttttgtcacaatcagtgtattaaattcaacaggcattcccaaagtgaaatcccctttcgttctcttttttctttatcataacatatttcactgtcagcggtttttcatccattgtgtgagctgccgcacgatacgccggttttcttttggcgggaaataatgtgtgaatgtactgtagtaccacgtctccaccggcttatgcagttgttttagcttctcttcaaataaataggaatgctgaattgaaacattttggtctttttctccatggattaacagcacgggagcctgaattttgtttacttggtcaaacggtgtcctccattgatattcctcaggcacctttttcggtgttccgccgatgactcttttcatcattcgccgcaaatcctgccgctcctcgtatgtaagaatcatatcactgacgcctccccaggaaacaaatgaagctgcctgcccgcccatttcgatcgcagtgagcattcccataattccgccgcgggaaaaaccgaagatgtggattctatccttcttgacatttgggtgctgctgaagcaggcgaaaagcagaaaatgcatcctccctgtcttctcctgcaaaatcctcattgccttctcctccttgatttcctctgtaaaaaggagcaaacaccacaaacccttgggatgcaaactggataatccggcccggccgaaccatgcccacgcttttaatcccgccgcgcaaatataaaaatccgtcatattgtcccggttccgccggctcagccagaagccccttaacccgtaatccatttgacagatagcagatcgtatacaaacgcacatgctggcttggcgacggaaatcttcttttctctacaatcaaaacagccgcctcctttttttctatatgctttccttactccaaaattacatccggagaacctggttaggcattcacacatttttatac

SEQ ID NO: 15 - DNA, 1089676 bp, Bacillus subtilis
ccatcatacgatatgtaaagcaaaaaaggatattaacttgatgcgaaataaggaggttgtctatgtgaacagatggttaaggctgagcttcgcctgtgtcggcagtatctttctgatgttcgccctggcggcttgcaagcaggaagaaacgctcacaaaagtcaaggtcgctgaagtgacccattcaattttttacgcacctttatatgttgctgagtctaaagggttttttaaagaagaagggcttgatgtcgatgtgaatacgacctggggcggagataaaacgatgacatcgcttctttccaacggctccgacatcgcgcttgtcgggtcagaaacatctatttatgtcgaagcgcaaggggctaaagatcccgtcattaatttcgcccagctgactcagacagacggaacgtttcttgtcgcgagagaagatgttgaacacttcgactgggatcagctgaaaggaaaaacgtttctcggtcagcgaaaaggcggcatgccgcaaatggtcggcgagtatgtactgaacaaacataagattgacccgcgtaaggatatagacctcatccagaacatagacttcgccaatattgccaatgcgtttgcttctggaaccggtgagtatgtacagctctttgaaccgcaggcttctctctttgagaaaaaaggcatcggccatatcgtggcttcattcggagaagaatcaggagaggttccttatacgacttttatggcgaaacaaagctatttgaagaaaaatgaagacacagccgtcaagtttacaaaggccatttataaggcgcagcagtgggttgaaaatcattctgcgaaggacatcacagatgccattaaagatgaatttgatgataccgacccagacgtcatcgaaacatccattgaacgctataaaaaacagcattcatattcgccagaccctctgcttaacgaaaaagaatgggagcttctccaaaccattatggatcaatcgggagaactgccgaagcacattccatacaatcagcttgtaaataaagaaattgctgaaaaagtcacctcggagaaataggaggcgccatctatgtctttcttacatgtcgaccatgtaacccatacttatttttctattaaagaaaaaacaacggctgtgcgggatattcatttcgatgccgaaaaaggcgatttcatctcatttctcggcccaagcggctgcggaaaaacaacactgctttccattattgccggtttgattgagccatcagaaggcagagttctgattgaaggccgtgagccgaatcaaaaagaacataatattggctatatgcttcagcaggattacttatttccctggaaatctatcgaggaaaatgtgcttctcggtttaaaaatcgccgacacgctgacagaagaaagcaaagccgctgcactcggtctattgccggagttcggcctcatagatgtggagaaaaaatatccgaaagagctgtcaggcgggatgcgccagcgggctgcgcttgcaagaacacttgcgcctaaccctagtctgcttttgctggatgagccattttccgcgcttgattttcagacaaagctgtctttggaaaacctggtattccgcacattaaaggaatatcaaaaaacagcagtgcttgtcactcatgatataggggaagcgatagcgatgagcgatacgatctttttattttcaaatcagccgggcaccatccatcagatttttaccattcctaaggaattggccgcaatgttgccttttgacgcccgtcaggaaccttccttccagacactgtttcaaacgatatggaaggagctgaattctcttgagaaacagcaaagaaaccattgatctgcttcacgagcagtatcaattcaaacagaaaaaggaaaagtggaaggtccattcctttcagcttgccatatttattctctttttctcgggctgggaaacctccagcaggcagggctggatcgatccgctgatcttcagctctccatcagctgtgtggcgattattgctggagaaacttggtgacggttctttactgtcacacatcggcgtcactttatttgaaacggtgcttggctttttgcttgggacgtttatgggcacgtgcctcgccgctttgttatggtggtctaaccgacttgccagaattttagatccgtaccttgtgattttgaatgcaatgccgaaagtagccctgggcccgatcctgattgtcgcgctcggtcccagttttatcagcatcattgcgatgggagccatcatcagcgtcattatcacaaccatcgttgtctataccgccttccaggaggtcgacgaaaactatacgaaagtcatgaaaacattcggcgcaaaaaagtgggttatttttaaagaagtcatactgcctgcatcctcccccgcgattatttcaacactaaaagtgaacgtcggtttatcatgggttggcgtcattgtaggggaattcctcgtttcgaaggtcggattaggatatatgattatttacggattccaagtcttcaattttacactcgtcttcttaagcctgctgatcatcgccatcttcgccactctgatgtatcagggcgtcgagctgctggaaaagaaatggacgaaggggaggacataaaaaacccggcacatgtgccgggttttttattcaatccatccagattctttcagttttttcaaactgatcggaagtacggaatccttcataataaagctgaattttttattgcgggaaaggttctccggaagctcgtgaaacaaaaccgggcctttcgtttcaaagtaatcagcttgcttttcaagcttttctatatctgcaaaatatatatttttcacaatcactttttcttttccgagaactttatactgtccgagatacttgaggcttttgactctcgcgcccgtctcttcctttacttcccggagcgcagcctcttctgcgcactccatcggctctactttcccgcctggaaactcatagcctctgtcctcatgttctgttaaaagccatttgccgccaaaacggcaaatcacccagacatgcttcgggctgtccgagaaaggctgatcgtcaaaggaaagctgaacagtattctgataataatctttaaactcgtacatgtttatccctcaaatccgttcctagctatcttccatacatcataccacagttacgtttcttcggaagccttttatcaaaaaataagggaaacccagcacgccgtcaggttctgcatgcagactagctcgtacagtttttttgcgatagcttttgccgaaaagtgcgaccgacgctctgggctttattatgacccgcgaacagggaaaagttacggtttgcgcttaaatttattttttaacgtttctaaaagatcgacaagcatctgaggaaccggtatgccaagagaactggctgtcacaacaatttgcacagattcataaagaatataaaacataatagccaagtcacgaattgatccctctgtattcagcagctgatcaaaaaagtggcatacagagatcagagccagcgtgactaattttttgacaagccgggcaaatacctttttaaatgacagtttgtgaataatggtttccttcaaagtcgtactgataaattcaattgccataagagagagcaaaatcagaaatgaatactgaaaacctccaaagaaaaaacccgctgctgaaacgctgactgctattaacgaaaagatgccaaagtctctatccatttatcccaacatcctttcacagaaacggccttacgatattctatggaaaacaagccgaacggattggatttttcagaaaaatggactggttgtcgcctatttttcagatacaaaaagaaaagccggacgtcttttttaagacatccggccgttctttttttggacttaacctaggtaagcttttagcatccagttatgtttttcaatattttgatggatcgcaagaagcatgtcccctgttgtttcgtcaccgacttcatcagctaaatccatgccgtttttcagctcttccgcgatgactgtgaaatcatcatatacgctttgaaccatttgttcagctgtttcatttccagccgcttctttgacagaagccgtttctaaggattccttcattgttgcaatcggttttccgttcagcgccaaaagacgttctgctaagtcatcaatataagttgccgtttcgttgtacagctcctcaaacttttcatgaagagtgaagaaatcttttcctttcacataccagtgatagttatgtagtttcacatacatgaccgtccagttggctacttgtttgttcactgcttgaatcaattgttctgacatggtatctcctccttgttatatgactatgtatacccttaatatcgtacgctaaaacctcttttttacccttatctgtcacgatttcttctattatgctacaattgttaaaaaacgggaggtggaatgtcatgacgcttctcattacgataagtattttgattgtgctggctgttttgcttgtaaccatttggacgactgtaaaagcctataatgtaaagcataccattgatccaccacaagaaaatcactctgattcacacaatcaatgatgatgtgaatgttcctcttctgactgattgctggcagcatcggcgtctccgacttggacttttaaggtcggcatgctatgctgtttttttgctgtgacatgggattggacagtgtatacaccatcttccttaaacgtcgtttccaatcggtatacgcctttttcttgtttcgccttaaacatttggcttgcgtctttttccccttctttccatacttcaaactctacttcatcggcatccgtcacagcttcatcaccatatgatacggctgcttcataagcagcgctttctccgggatttactttttcaggcccggtcagcttgacatccaaaacctcgggcgtctcagctgtatttgctttgctttcaccagatccgcatccattaagcaataaagcagaaaaaagcagaacaaccaacatctttttcatgccatcaccctttcatcgtttacctaaatagtagcaaacgcttacagcaaatggtacataaaatatgagacgtcacaaaaaagacctttttgcttatgcgcaaaaaggtcctttctattttagccaaatacttttagcaattcttctttatcctgtgaaagccagaaacgcattaaacgtttagcgccttccagatcatgaagcttcgcttggccgcactgcttttcattcgcagctggtatttctgtaatctctaccgcttccttcattgtgtcttcaagtagatcaacgatttccgctgatgtcggctctccgctcacaactagataatagcctgtctggcagcccattggagaaatatcaatgatatcaaaatgatcgtatttctcagcgtgagaacgaatcgtaaacgcgagcaaatgctcgagtgtgtgaatggtgtcaggcttcatcgcctgtttatttggctggcaaaaacgaatgtcaaatttatttacaacgccgtctgttcctactttatgcacgccgcaatgtcttacatatggagcaacaaccgcattatgatcaagctcaaaactttctactgaaggcataatggcactctccccttttttaaaaatgtaatttcattataacatacttttccgataagaattattgattaacttttcaatctgtgttttttttcttatacttgcatcagaaaggttgctgaagaaacatgaaaaccctattcatcgctctgatcagaggatatcaaaaattcatctcgcccctgacaccgccaacgtgccgcttttatccgacctgttcccaatatggaatcgaagcgattaaaacacatggcgctttaaaaggcggatggctgacaatcaaacggattttgaaatgccacccgttccatccgggaggagtcgatcccgttcctgaaaagaaacaaaaacattaattgttataaccgtttacgataagatccagttttccggttttaggatcaatgactaagccatggaccggaacgttttcagggaacagcgggtgatgtttaataacgtctacgctgtctttcacactcgcttccactgaatcaaagcttttaaaccattgatcaaagtctacaccggagtactttattgtttcgatgcgttcttccggaatccctcttgctttgattttttcaagcatgcttttgctgctgattttgctcatgccgcaatcgtgatgcccgatcacacacacctcatctgcattcagctcgtacactgcgacgagtaaacttctcatgatgcttccgaatgggtgtgtcacaagcgcaccggcacttttaatgattttcacatcaccgtttcgcaaattcatcgcatgcggcagcagttcaaccagacgagtgtccatgcaagaaagaatcgccatttttttatctggaaattttgatgtttgatacttttcatactctctttgttcagtaaatgtcttgttaaattcgagaatatcatttagaagactcatgttcgttgtccctttctattctttttactcttcaatatatcacaacccttgtttattcgtcataataaaaaaagacaaaccctctggtctgccttatttccccatgttatagcgttttttgaactgctcaactcgtccgcctttttcattgaatttctggcggccagtataaaacggatgcgtgtcagagcttacttctactttaatgacaggatatgtgtttccgtcttcccactctgctgtttcattagatgttttcgtagaggtgctgagaaaacggtagccgctgttgacatcctgaaatatcactttgtggttcttcggatgaattccttctttcatgtgaatctcctttcaataaatcgtaataattacgttttattctataaccttacaaacgttttgtcaatcttcttatatccttccctctgttttcacatcgtaaacctcatggcatttaagaataggaagaataatctaaccgaggaagcaaataataaacccaaaatacatacagaacgtctttttagaaaggtggtttacgattgtggatgatttagttttggccagaagcctctttggcacgacaatgggctttcatattattttcgcaacgcttggagtcggtctcccgctcatgattttagtggcggaattgatctatcaaaaaacgaaagatgaccattatgcgatcatggcgaaaagatggacgaaagcacaagccgttttgctgggggtcgccataccgaccggaacgatcgcgggcactcagctcgcgcttttatggccgggatttatggaagtcattggccgggtgatgtccctgccatttcaaattgaaatctatgctttttttgttgaagccctattcatgtcgatttatgtatacgctgcagaccgtttgtcacctgcaatgaggattgttgctgttttctttgtgttagtcggggcagcagcatcagctgttctgattacgaatgttcacgcttttgaaggaacgcccgccggttttaaaattttaaacggaaaaattacagatgttgacccgtgggctgcgttttttaatcctagcttttttatcactgccggccatgtcgtgctgtccgcgtttatgaccggtgcatttatcgtggcttctgttgcggcgtataaaatgatccggacgaggaaaaaggaaaaggtctatcgctttcaccggaaagcccttttgctcgcactgacgatcggcggtattttttcattgctgaccgctttgaacggacacgaatctgcacagatgctgtacgaataccagcccgaaaaattagccggtgcggaaggcctgtttgaaacaagatcccacgccccgctcgctatcggcggttttaccgacccgaatgaagaaaaagtaaaatgggcaatcgagattccatgggctttaagctttttggcagcgaaccgttttgacactgttgtaaaaggattaaatgcatttccgagagatgaatggccgccgcttttcattcacacgctgtttaatgcgatggtcggtgtaggcatgctgcttattctttattctattattggtgtggtctggagaaaggtgctcaagaaagaccgtttcccaacgtggcttttggtcattttcatgacagcaggcccttttagtctcatcggcattgaattcggctggattttcgcatgtacggggaggcagccttgggtcatctatcatttgctgaaaacatcggatgtcgtaacaacgactggttcgatcggagtgctcttcttgtttttcacatttgtttatgccgtgttaggcgctgctgtcgtctacgtgctgctgtactatttccgcaagcacccggttgacgaagatttaaatacagcggagtcgtaatggctccgcaaacaggaaaccaaatggaaggagatcgacaaatggagatttcaactgacgctctgatcgccatctcaattatctggggctttgtgtttatttacgccgtcatggcgacaatggattttggagcgggattttggtctatgatctatttaaacaaggagcatatgaaggccaccgatattgcgaatcgctttttgtccccgacttgggaggtcacaaatgtctttattgtggccatcgtcgtggcgcttttcagttttttccccggcgcgacatttgtgctcggcaccgttttattaattcccggaagcatgattttactgcttttagcgattcgaagcggatttctcgtgttttcaaatacagcaaaggagcggaaaacgctaagatatatttccggcatctccggctttatcattcctgctattttaattttggtgcttcctgtgacacacggagggtttatagaaaaaacggatggaatctataacttaaatatgtctaaaatcttttcaagccccaacgcctattcatttatcgggtttgcgattttaagcaccttatttttgtcctcgctgctgcttgcagatgtttcaaatgtggcagaggaacaggatgcgtaccgagcctacagaaaaagcgccctgattaccggcccgatttcactgttgtttgcagtatgcattatggtgacaatgcggaatgaagcaaactggctgtacagcggaatgatgaatgattttacttggattattgcatcgttcattacatttgtcattgctggaatcgccctttttctgcctaataagagctttgggcaaaacatcggaaaaccgcggcttgcacttgtcgcgattgggatacagtattttctcgcaagctacgcgtacgggcgggcgcatcttccgtatatgatttatcccgatgtgacagtcatgtcaggcttcacagagccagcaacgttcagagcgctgtttgcaacgtatatcgttgcatttatcattctatttccgggcttctttttcttctggaaaatgtttatgcgagataaacgctatatccgccaggaggaatagagggcaagccagccggctatactaatccagaacctttataaggaggggatggcatggagcagaaaattctatgtgaggtcaacaactgttcttattggggcaaaggtaacaaatgcaccgctgatgccatttatgttgtcagccatactggtgaaacggctgaaaacagccgggaaacagactgcaaaacgtttaagccgcatgatttgtaattaaaagaaagagctgcatcagccagctctttctttttgcatgttgagtgttctcagctttttagttatgaccccgtttgcaggtgaaaacaaaaaggcgcttgcataacatacacctgtcatggccgccatcgctcctgaaatcgaaacattaagccacgttgcgaagaaatagcccatgaccgccgacagcccgccaatcaacgcgctgagaatcagcatataaagaagccggtctgtcagcaaatgtgccgcagccggcggaacaatcagcatggccacaaccaatacggcacccaccgaatcaaaggaagcaacagtcgtcaaggacagcatgcccatttgcacgtaatgaatgagcaaaaccggtattcccaaggctaaagccatttgaggatcaaacgaagcgattttaaactccttatagcacacactgatcaacactacgtttaaaaccagaacagatgccagcatccaaaacgctttcggcccaatatcaaccccgaataccgtcaccgtattccacggcacaaaagcgatttctcccattaacgagtgctcaatatcgagatggacattcgctccatacacagaaagcaaaataaccccgattgcaaataaggatgtaaacacaactcctatggcagcatctgattgaacccccttgctatgaagaagctgaaccaagaaagccgttaacagaccggttgcggctgcgccaataaacatataaatcccatcgagacttcccgtcactagaaaagcgccgacaatgccaagcaacactgtatgactgattgcgtcggccagcatcgccatgcttctcagtacaagaaatgtgccgatcaatccgcagcttacaccgactaatacaccggtagctataatccatgcttcaaaactcattcgcgatctgtcccttctcggcatcatgagacacttttcgaagctcaggcatccgtccatacagctttaagagtgaataaagccgctctctcgtttctctcggtaaacggtccgggtcaaagtagtcctgatcggattctatattggcaagttccatttcatgcatgagatacacttcatacatccgctgcttcaaagctgtgtgatagcctttttcaatccctttgcttgtgatttgccaaatcccattttcgatacgctcaatgcacctctcttgttccaagtcatttaatgccttaaggcataatgaaggggataggcgtcttttctttcttacactttcaacagttacacaaagatttttcttttcatactgttcataaatcgccaaaagcacttgctccctgcttgttctgcgccgcagcctcatcagccttatggctttagcagccaatccccgcttaggcgcgcaaatcattgaaaaaagaaagagcagcgttgcagataagatcattaatggccctgtcgccattcccttcatcgtggtgctaagcagggttccggccactccgctgaccccgcctgtaatcccggcaatgatgatcatcccggttaatcgttcggtccaatatctcgcggttatggcaggtgtaatcagcatagccgccattaatatcacaccaacagtctgaagcccaatgacgacagcacagacaatcagacaagccaaaagcccgtttaaaaaacgcaccgggattcctaatccctttgcaaacgcgagatcaaaagtaatcaatgtaaattccttaaagaaaacaatacataggagcagcagagcagcggatatccctgcaataaggatgatatcctgcctgaccaatgaagcagcctggccgaataaaaaagaatcaagcccgctttggcttcccgccccctgttgctgaatatatgtcagcagaatgatcccgacgccaaaaaacacagaaagaacaatcccgatcgccgagtcctcctttgtttttgaaagccgaggaatcagctgaatacaaaacgttccgagcagtccggcgagcgctgcccccagcaaaaagaaaggcagtgatttttgcccggtgaacagaaaagcgagacacactcccggcagagctgaatgggccatcgcatcgccgattaaactttgctttctcagcagcacaaagctgcccaaaacaccgcttgccgtcccgagcaaaagcgtaccggccagcacccactgtgtattcggatgctgaagctgcagccacaaactttcaaacattgcgctcactccttatgtccttctgccagcactttatcttttaaaaacgtaagccttcctccatatgttttttgcaggttttcgatcgtaaaaacgttttccgccggtccgaaagcgattttccttaaatgaagcagtaagatccaatcgaaataatcctcggcggtctgcagatcatgatggacgacaagcacggtttttcctttttctttgagctctgccaacagcgtcataatcgcgcgctccgtcgctgcatcaacacctgcaaacggttcatccataaaataaatgtcagcgttctggcagagtgcccgggcaagaaacacccgctgctgctgtccgcctgacagctggctgatttgcctcttcgcataatcatgcatcccgacttttgttaatgcggccttcgccatctccacatccgctttctttggcctctttaataaaccgattctcccgtatcttcccattaggacgacatcgagcgggcttgtggggaaatcccagtcaaccgagccgcgctgcggaacatatccgattctggtccgctgatccttatagtctttgccgtaaatagagatgtctccggaagctctgggcacaagaccgagaatcgttttgatcaaggttgattttcccgcgccgtttgggccgataatgccaataagttttccttcaggcacctgcagcgaaatgtcctgcagtacaggctttttatgataagcaaccgtcacattatcaagctcaacagggaacatatcctccacctcttttctttatttaagcgctttagtaatcgtgttgatattgtgacggaacattccttcgtatgtgccttcttttgtgcccttttcacccatggcatccgaataaagctgaccgccgattgtgactgtatggcctttttctttagcgccttccaccactgcattgattgatttttcagatacactgctttctacgaacacagcttttatttgtttttctgtcagaagatcaaccagctcctgaacatcccttaatccatagtccgaatctgtgctgagtccctgcaggccttttaccttaaatccatactcattcccaaagtacgcaaacgcatcatgagcagtcacaagcacacggcttttctccggaatatgtgcgatctccttacgcgaccacttatctaaatattgcaaatcttctttgtactctttggcatttttccgaaaggcatctgcgtgctgaggcattgctttgctgaattgcgcttcaatttcatccaccgcatagatccataacggaatgctgaaccagacgtggggatcaaacgtcttgccttcccccgcgggaataagcttatttttcggaatggcctcagctactgccgccgattgtttttgttcgccgattttttggaggacatcctccattttcccttccaaatgcaacccgctgtacagaacaacatcggcagacattaattttttcgtgtcaccttgggaagctttgtaaaggtgcggatcaacccccggtcccattaaagaggtgacttttacatgcttacctccgatgttttctgctgcatcggcaatttgagatgttgtcgctgtcacttgtaattgctgatcagcgctttttccggctgaatccgttccgcatcccgttaaagcaaaggtcgcaaaaagtactgctgccatcagcccttgtctcatatttctcctcctctttgccatcaatgtccgattgttttatcttatgttgtcagttcttagacatgtgacattaaattagccaaaagcatgttttatttacacaggacaaaaagtttcccttatgcaaaattatcgcgtttggccatttttgtcaagctgatttacataaaaaaaccggctgggtcagcagccggtccaaacgagaagggatgtattcaacgaacacttttactgtaacagcacagtgtcatttattcaaaatagcaaaatgcttttttcttaaccatgctgtgtgaaaacatccattttggtcacatattttcgcataatatcttggtttacctcaacccctaaaccaggctgttttgacacagaaataaatccattatcaatacgaatatcaggagttacaatatcttcatcccaatagcgtgaggatgaagatatatcgccaggtattgtgaattgaggcagtgaagcaagcgccacgttctgcgctcttgatatgcctgtttccagcattcctccgcaccaaacctgcatatgatgctctttgcataaatcatgaatttttaaggcttctgttaagccgccgacacgagaaggttttatattaataattttgcagcttcctagctcaatcgcccgtctcgcatcatcaactgaacaaatgctctcatcaaggcaaatggccgttttcaaatgtttctgcaagtggcggtggtcaacgatatcgtcagcttggagcggctgctcaatcatcattaaatgatagtcatcaagctcctttaaacggctgatatccttcagttcgtaagaggaattggcatcggccataagcgggatgtttgggaatcggctgcggatggccttgaccaattccacatcctgcccaggctgaattttaatttttattctttgataaccttctttttgatagctctcaatttccttcagcatatcgtcaagaggcgccaggccgactaccaccccggcagggactttatctcttgttccgcccaatgcctcagcaagggatacgcccttctttttggcataaatatcccatacagccgattcaagtcccgcttttgccatccggtttcctttataccgcgccaggctgtccggcacttctgaagggtgattgaattcacggccgacgacatttgggataaaaaaatcttttagcatatgcaaacatgttccaatggtttcctcggtgtaccaaggcgaagagaaagcggaaacttctccccagcctgtgacacctgatgtatcaatggcttccacgatcagaaatttacgctcttgaagcgtttcgatactgtttttaaacggtttctttaagttcatgctcaaatggtaaagcgtgattttttctatttcgatcatagcagttctcctttacgcgcatccttcagctgatttcgcaagagcttattagacgcattgcgcggcaggcggtcaagcacaaagaattttgccggaattttatacttcgccaagcgttctttgcagtagtcagtcaattctcctgcgctcacaggcttgtgaaggacaagataggcgtgaggcactttcccccattttttgtcctcagcccctgaaaccccggcttcggccacagcggggtgtgaaagcagtactgactccacttcggccggataaatgttttctccgccggatatgatcagatctgaacgtctgtctaatacatataaaaagccttcattgtccaaataaccaagatcacctgttttcagccagccattttgaaaggaggcttcgtttgcgctctcccggttaaaatagcttttcatgacattcgggcctttgaccatgatttcaccgtgttcatacggttcacatacctgtccgtcccgctctattttgatttcacatgaaaacagcggtttccccgcagatccgagcttttccatactgaattccggcgacagggtaacaatttgtgagcatgtttctgtcattccatatgactgaaagacagggaatcctttctcacggcattcctcaagcaatggcagaggtgcagggccgccgccgagaagaatgcatctgatggattcagggcagcggcttgtttcttccaaaagactggccagcatagtctgcaccgcagatatcattgtcacttcatgcctgttgatagaattcagcacatcgcttacggaaaaacgctggtgaagcacgacagtcattccatagatcacagatttaaataatgcggacaatccgctgatatgaaagagcggcaatgcgataagccagcggtcttgttctgttatacccaaattaagcgcggacgacaccgcactgaaatagtggtttccgaacgtttgctgaactcccttgggctttcctgtcgtacccgacgtatacatcagcgttgccgttgcatccatttgcatataagcctcgatctcaatttcctctgctgcttctttcatcagttcatccacatcaatcgtttgaacgatgtgttgatattctttcttctcaaagcttgaatctgtcaataaaaagccggatcccgaatcctccagctgaaacagcctttcatgtgttgacagcttcgtattcaaaagcaccgccttaacaccaagcaaaaaacaagcgtgaacagcgtataccatttctgcacggttttggagcaaaatagctgcagtatcccctttccgaaccgaatgagcggcaagctgttccgccattcgtttagacgcggcaaacaattctgcaaatgtcacggtttggtcttcatagatgagagcgattctctcaggtgtcagctgtgcccgctgcatgagccagttgggctgttctgtcagcatgtcatcatctccgaggtaaaatgtctgtattgaaaagaaaacagcttggaccgcaaagtctcaagctgttggtttactaggtattgctgatcacggaaaacgagggaactgtccgaaatcaggtttgcgtttttccttaaaggaatcacggccttcttttgcttcatctgttgtgtagtaaagaagggtagcatcccctgcaaactgctgaattccagcaagtccgtctgtgtccgcgttaaacgcagctttaagaaagcgcagtgcggtcgggcttttttcaagcatttcttcacaccatttaatcgtttcttcttcaagctgttccaaaggaacgactgtgttgacaagacccatgtccagtgcttcctgtgcgttgtactgacggcataggtaccagatttcacgtgcttttttatgtcctacaattcgagccaggtagccagaaccgtaacctgcatcgaagcttcccactttagggcctgtttgtccaaaaattgcgttgtccgcagcaattgtcaagtcacatacgatgtgaagcacatggcctccgccgatcgcatatccggacaccatcgcaacaaccggtttcgggatgacgcggattaaacgctgaagatccaatacgttaagacgcgggatctggtcgtctcctacatatccaccgtggccgcgcactttttggtctccgccagaacaaaatgccttgtcccctgcaccggcaagcacgataaccccaacgttttggtcgtctcttgcgtcagcaaacgcatcaatcatttcagcaaccgttttaggggtaaacgcattatgtacctcaggtcggttgattgttatttttgcaatgccattatacgtttcatacaatatctcatcgtatgtccgttttgttttccattcagccatatgatgacctccttttattctctatgtgaatgagtcagatgcttgtcaaaaactcactcactattttaccaaacaatcgcggctgttccacatggaccgtatgtcctgcttttggaacaatctctattctactagaaggaagcatcttatgcacctcttgattgatggcgcaaaatttttcgtcccactccccgcagataagaagcacaggaacatctatttcctctacacggctccacaaggaaggctgtgaaccggtgcccatgccggttaaactgttcgcaagcccaatcttattgttccgcagacggcccgatcgtatcctgtgccgaatatcttcagccagcctctgctgagatgaaaacaaagggatattctcccaatacgcaacaaacgctttgagcccgtctcgtaaaataaaatcagcaagcttccggtcccgcatgattcgttcccgccgttccccaagtgttttgagccccggcgtcgtgctttcaagcacaagtgccgatacccgctcgggatatgtcatcgcgaaagagtaagcaagccttcctcccatagaatacccaatcaatttcactttgtgaagttttaattgatcaaaaatctcggcaaggtcagaaacttgccggcttgtgctgtatcttttcccattcagcggggcatcggtttccccatgccctaaacaatcaattttgatcaaacgggaatcaggcagcatttcatcaagaaaagtccatgattgtttgctgccggtaaacccgtgcagacagacgacggcttcggaagcattcggtccctcgtctgccactgcatatcggacaccatctgataccgttatgtttacagttcccattgttttttcacttcccgcacagcctcattcagcatatcgcgatgaagctggactcttgattggcgatccgttttgatttcaatcaaatggagtccgggcttgtctgcctgcggcgcgtaagctgttttgaattcatcccaagaagccgggcatgaatacgttccgccgtaaagtgcagcggcatgcttgaaatcgagccctgtcggtgtgccgaacaaatcttcaaagtgtgtcttctcagaagcctgcggcaaaaaggagaaaatccctcccccgtcattattgacaagaatcacagtaagtggaatacccagctttttggccgccagcaagccgtttaaatcgtgataaaaagataaatctccaatcacaagggtaacaggcgcttttgttccttcacatacccccatggcagaggagacgacaccgtctatcccgtttgctccccggtttgaataaatccggaaagggcggtcctgcttttcgaaaaacgtatcaacatccctgatcggcatgctgtttcccacaaacagcgagctgttttcaggcacaagatgctgaaggattcgatagagattgccttcaaacgaaacatcttcactgctgattgtttgcagatgctcgcggaaccgcccattgacaaactgccacttttccagccactctgaggatctggcagcagcagtaaggcctcccatgatctcctcagcaaaaacagacgcattacaatgaatcatatgcgcgcttgcctgtgtcgggtctctccaccctccatcctcgtcaatcactatttgctgaatcgcaggatcatccttaagccataagaaaaccggttttgaaacaggcatcggtccaaaccgaatgacaacatcaggacgaagtttccgcttcagctcatcatcttttaaaaacgaatcatacgcatcaataacagtgcttttatcatgaacaccattccgcagattagacagcggatccgctaaaattggatactgaagcgcttttgacagcgcaataatgttttccttatccgcatcactatggagctccccgcagacgatcattcctttttcagcctctgcgagcatctcagccacatcagacagggactctcggtcaacagactgcgtacccgttttcacagacacatgacggcctgttctcattcttccaaacggctcatctgaaagatccggcatcagcggttcgcgcagcggcacattcacatggacaggccccatcgggcgcttttgtgcttctccggcagcgcggcttgccagcgttcggatgtatctcagcatttgcggagactcttcaggaagagcagagtctgtgaaaaacttaacaaagttaccgaataagaagtgctgattaatagcctgcggtgcgcctacttcgcgcagctcatgaggccgatcagcagttaacacaataataggcacccttgaataatgggcttcaaccacagccggataaaagttggccgcggctgttccagatgtacagatcaatagtacgggacgctgcttcgcttttgccaaacctaaggcaaaaaacccggcagatctttcatcaatttggacatggacgctgatatcgggatgcgcagcacaaagaacagccagcggtgtagatcttgagcccggacaaacgacggcgtccgtaattccggaaagggcgaattcatcaataaaacttccgatgtaatgagtaatcgggttgactgtcaacgcctctcacctcctaatgcagagatcatcggcttcaatttaatctgtgtttcttcatattccgagattggttccgagtcttccacaataccgcacccggcaaacagccttgcagtgcttccttcgatcagccctgaacgaatggctaccgcgaattccccgttatcctggctgtcaatccagccgataggggcagcataccagccgcgagacatcggttcaatctccctgatcacgtcaacagctttttcctgaggtgctcccccgagcgccggagtgggatgcagcttctcaattaagtcaaaaattgaagcagactcgcgcagctgtccgacaatcggcgtaaacaggtgctgaacgctttttgttttgtacaaaacaggtccatcaggcttttcaacctctgaacagcttgatacaaaagcattatgaatcatacctaccacaatatcatgctcaagcaggtttttctcatcgtttaataattcaaggcctatccggcggtcgtcttcttcattcacgcctcgtttaatggagcctgccagacaggaagacatgacagtgccgccgtctcttttgatcagtctttccggagacgcgccgacaaaggttttgccttcttgttcaattgcaaaaacatagcttgtctgctgatcgtccagaagcgttttaagcaccggttcaatttggattggaccgtcaaacgtgagcagcagctctcgggcaagaacaaccttatcatattgtttctctttaatttggcttgtggccgtttcgattgctttcagccaatcatccttatccagctcttcggctgctgcaatcacagcctgatcttcttgcttgaaatcgggaaccataaattccgccgcaaaagcttttaagccttctaaaacagcttctgcgtcttctcctccgcttacccatctgttaactgttaagaacgggccttcagcagtcatcgtcagcataagcgcaggcacaaagaaatccccttccgagaaatggtcccattgtgaacctctttcttcgcaagggtcaaaagaaaatcctccgaataacacaggtcccactgcagaatgctgcagcttttcttcttcataaatatgaaaagccgtctttttaaagcgctcccattgttcaaaaacctcacgataccgctcgctgtttttttgatttgtctggaaaaccgcttctttgccaagaccgactattgtcaattcactttcaggatctgaccaaaaaaatcgattgcctgtatatttttttgctccgtaattgaaaaatgatagagggtcaagagactcgatttgtctcgaatagcttattaagacagcatggttgacttctttggctttatgtaatgcatgtagaacttcctttcggaacgtacgctgcaccgttgtcaccatgagacattcctccataatccttaaaatgcttttaataccatacacctgtgtctcctttgtgtcaaacacagatcatgcagtccaaatggcctgccttacctattataaacctaatttcagaaatgaaaaagaaacaaagcttaaatttctttctccactgatagcaaaggttgtatccgcttaccataaaaggaaaacctcctatattcctccacccgccatttatgaaagttctcaggcgatctgttcatactaaaggtatgcatcacagagaaacgaggcgatcacattgcttacgaaagaacagcttcagcatttaaaaaatgaactggaacaaacgaaaaaagatatcttaaaccgtttcaaagacaatgaccattttcagcttaactcagcctttccttatgattcgtggggtgagctttcggcatacgacaaccatcccggcgatcaggcgacagaactttacgagcgtgagaaagacatcgctctagacttgcatgagcgagagcaccttcgggacattgagcattcattgaaggcgatagaaaacggtacgtatggcatttgtgaagtcagcggaaaggaaatccctttcgaacgacttgaagcgcttccgactgccacaaccctcgcggagtattcgtcacaggacgtggtttccaaagaccgtccgattgaagaagaaacaccattcgggcaatttgaatttgatgatgatgaagaaatcagagcgccatatgacagtgaggattcctatcaggatgtcgaaaaatatggtaactcacaaacgccgcaggatatggaaaaccctccgctcagctatgatgatatgacgatgaataccgaagagaatatcggcaatacggagtcttacgaaaatttcatcgctacagatatcactggaaaagaaattaccgtttatcaaagcagagcccatgagcgctatgaagaagaacttgacgaagagggaatcatgaccacattcggcgatctccacgctgattgaacccccaattattgggggttcttttccgttttcagcatatcgtaaatcagcttcagataatccttttgcaggccgatgtcataccgctcgccctctagcaatttcccgtatacggtacatgccccgagcgaagcttttatcgcatccgttacctgcacttctcctccgctatcagcttctaatgcctccagctcattaaaaatatccggtgtgaaaatataacgccctgctgcggcaaaatgagacggagggttttgtttaggcttttccacaatatcctgtatgcgataaagccctttttcaacaggctccccttttatcaccccgtaatgatgtaaatcctccgtttttgtttcttttaagccgatcacactggactgatatttcgtatacgcttcaatcagctgccccaaagccggctgattggcggaaaaaatcagatcatctggcaaaacgacggcaaaaggctctccgcctgcaaattgctttccgaaagaaatggcgtcgccaagaccctttgcataaggctgccgcacatagtgaatccgtatatccggaatgggatgctctctaagtaaatgcagtttattcttagaggccaaaaaagcctcaagtgccaaagaggaatcaaaatagtcgacaatcagatttttatggctcgatacaaccatcaaaatgtcctcaatgcctgactcctttaattcttcaacaagataatgaatcacaggcttagatcctaccggaaacatttctttcggaatcaccttcgtcaccggcagatttctcgtgccgaatccgcctgcaggaataatcgctttttttatcatggtattttcccctcagctcatgtttattacatgatattccaagagcgcatcccgatgtttgtacatctgaaattaggcggaagcaactgggcagaaagcggaatcacgaaccagcccttttttaataggatattgatatatgaccagtaatcttgtaaaggagctcaggtgatgaaaatttgtgtggttggcgccgggtatgtcggtttaaccctatcagcggcactggcatccatcggacatgacatgatatgcacagacaaagacgtcaaaaaaatcgggcagctgaaaaaaggagtcattcccttttacgagcctgggctttcagatgcaatacttcgttgcggcaatctctcgttttcttctgaagtgaaatcgagcatggaggaatgtcccgttatttttatcgcagtcggaactccgccgcgttcggacggatcagctgatacgaaagccctgcagtccgtcatcggtgatttaagcgaggcgatccgatcgtataaaaccattattacgaaaagcactgttccgcccgggacaaatgaaaacatagcaaaacagctgattgcctccggagtgtctaaaaacctctttaatatcgtatccaatccggagtttctgcgggaaggcaatgccttatatgacatgctgcatcctgacaaaacagtcatcggtgttcaggaagaagatcacgtatcggcagccatcgtcaaatccatttacaaacacattgataccccttttatcgttacaagcttagcgggagcagagctgatcaaatatgccaacaatttctttttagcggccaaaatttcgtttattaacgaaatggcccgcatatgtgaagcctatcaatcagatatctcagatatttcccgcgctatcggtctagacccaaggatcgggaagcactttttgcaggcaggcatcggatacggaggctcttgttttccaaaggatctgcaggcgctgcaatttgctgcccaggaaaaaaacacggagaccttcctgctccgggccgtgcagcacattaatgacacccagctcggcctgtatatcaaaaaaatacagtcattcttcgaaacacttcaaggcaagaaagcggctgtactcggcatttccttcaaaccgaatactgatgacatcaggaattctcaggctgtcagactgatggaaaggctggcggagctgggatgtgatgttcatgcatatgatcctgaagctgtacttccagaacatttgcggaagcatgtaactcagcattctcaagcttttgatgcgatcgaagaaagcgactttttatttttggcgacagaatggcccgagtttttagcgtttgattggaaaaaggctgcagatatcatgaaagggcgtcttgtgatagacgggcgcaacgtactgaaaaaagaactgatcgagacttgcggcctgatctgtacgggagttggccgtccatgaaaatactcgtcacaggagcagctggctttatcggctcccacctctgcgaagaattactaaaagataagaaacataacgttatcggaatcgatgactttatcggtcctactccattttccttgaaattaaaaaaccttaaaaacctgctgccggaaaagcgatttacgttcataaaggaaaatctgctgacagccgatcttgctcccttactggaaggagtggacgtcatctttcatttggcggccataccgggtgtccgctcaagctggggcaatcattttcacccatatgccgcacataatatccaggcgctccaaaggctcctcgaggcgtgccgggaacattctattcaaacgttcgtctttgcatccacctcttccgtctatggcgaaaaacaaggaaaagtcagcgaaaacacgtcgctttctcctttatctccgtacggggtaacaaagcttacgggagaaaagctttgccatgtgtatcaacagagctttggtattccaattgtgattctccgtttttttaccgtatacgggccaagacagcggccggatatggcttttcaccggctcattaagcagcaccttcagcaaaagccgcttaccattttcggtgatgggcagcagtcaagagatttcacttatatcggcgactgtgtcaaaggcatcaccgctgttcttgggaaaccccaccttattggtgaaacagtaaatatcggcggcgcagagcgtgcctcagtcttaaaggttgtctccctcattgaggatatttccggtagaaaagcaacactgcacttttcggacaaaatagcaggggaaccgagcaacacgtgggcggatatttcaaaagcaaaacagctcttgcattatgatcccgccacatccttaaaggatggcttgaccaacgaaatcgcctatttatcgtcgctgtatcagggggaataaaaatgaagcttgcctttatctgtacagaaaagctgccggcgcccgcagtacgcggcggcgctattcaaatgatgattgacggtgtcacgccctatttcagcagcaggtacaacctgaccattttttcaatagaagatccatcgctcccaaaaagagaaacaaaagacggcgtacattatatccatctgccaaaagaacattaccgcgaggcggtagccgaagagctgcgagcctcttcctttgacctcattcatgtgttcaacaggcctttaaatgtctctttatataaaaaagcctcaccaaacagcaagatcgttctgagcctgcataacgaaatgttttctgaaaaaaagatgaccttcgcgcaaggaaaagaagtactcgacaatgtctccatgatcacaacagtgagcgaatttattaaacaaaccgtcattgaacgtttccctgaagccgaggacatcacaaaagttgtgtattccggcgttgatttaaactcttatccgcccgtatggacgatgaaaggctcggctgtcagaaaaacataccggaaaaaatacggtattgaagataaaaaagttattttattcgccggccgcttaagcccgataaaaggacctcaccttctcattcacagcatgagaaggattttgcagcagcaccctgatgctgtactggtcatagcgggcgggaaatggttcagcgatgacagcgaaaaccaatatgtaacctatctgcgcacgctggcgctgccatacagagaccacataatctttacaaaattcattcccgcagacgacatcccaaacctttttctgatggcagatgtatttgtgtgcagctctcagtggaacgaacccctcgcccgtgtgaattatgaagcaatggcggccggcacgcccttaattaccacaaatcggggcggaaacggagaagtcgtaaaagacgaagtcaccggccttgtcatcgacagctacaacaaaccttcttcatttgcaaaagcaattgacagagcctttacagatcaagaattaatgaacaaaatgacaaaaagcgcccgaaagcatgtagaagctttatttacctttacccatgctgccaaaaggctcaatactgtttaccaatccgttctgaccccgaaaaacaaacaatttccgccgccttttctgacgcaaaattttgatttatcatctatcaatcagctttttgtgaaagcaaaaacataaaacctacagctcgtgttgcaaaacgggctgtttttttgctgcagaaaacataaaaaaaggcataaatgtgactttatgccttgcgctttacggtttgagaaaaccatggagctggtttagattcacttggaagaatgatgatttccactttagcttcttccgctaagtctggttcttcatcttcatcctcttcttcatatggggacactgagcgtttcgaatcacgctcctcctcaggctctagaatggtttcgaatttcgtttcttcttcatcatcgacgattttgtgatctgtttccttttccttcgtttcttcttgatattctttcggtgcattgatgtgagggagctctcgaatgctgcccacatctaaatgcttctcctcttcttccttctcagctgacattgagtcatgagcctgccaccccatcggcccaggcggtgtaaatacgaattggtcgagatccagtttagaaatagaggctttttgtctcgatgacctcatgtcaattcgcctcccgatacgcttttatctttttatacagttccggcagtttatccaaaaacgaatctttagattcttcaacagaaatcatgttttgcagcgcccagttatatttctcatctgaccacgttttcttttgcttcaaataatatttgtgcccgattgcacagaacaaatgcggaaacgcgagatcaatccaaagtacctcgtactgtttttctgtgagcggatacactgcgtcgtaggccgcaagcagtgcgaccatgaaatcagtatcccatacagaaagcttaaccatcactttattcagcagaatacgaaggtctcttgacggcaaatcgtaggtaatcgagtgaagctcctttaaaaaaggctccccttcgatctctgtcaaacgtgccaatgtaaaatcttgaaaacagaatccgccatgctcgagcgtttcttttgtccaggtttcgtattctgagtcatcaagcgcctgaagagcttcttttcctcttgccagcattttatcagcatgttttaagaaagtttgcgaaaatacgtcatcaggataggatgccgcgatctgcatattcccttcaagttcctgcagcttccatcggtacaatttatgccattttcccagcctgcttctcttcttgctttcatctgtgcaaacatatccttttgaggcatgatgaaaatggccggcaaatgacatgacttttttcatttgctctgcatcatagtaaatcatttcttttcctgtcactttgtcatataagctgtaagaaacctgatccgtgcccaagcagctcccgccattttttgtttgatgaatcggcgctatcggcagccctttctcttgtaaatgagcgtgtgcctgagtgataaaaagcatccgctccggtttcatttgcgcttcttttagcagctttgggccatgatcagtttcgacttcccagattttgcgcccgcttttgttcgatttcagcgccacatggtcgatatgaaacggataatagctgagaatttcggacacaatctgttcttcatgctctttttggtacactctgttcaccccttctatctgttcttttcatagacgctgagcagattttcagccaccctctgccagccaaaattgctttctgcctcacggcggctgtatttcccaagccgttcccgcttttcagagctgctcagcaaatcattgatacgttcggcatattgtttaggattttcaaagtcatgaatgatgtagccgtttttcccttcctctatgacctctggattgcctccccgattgcttgtgataattggaagtcccgcagccatcgcttcataatgcacccttgctaaaggctcctgccattgcgaagagcatacaaatacatctgacatggtataaaggcgcggaatgtcctttggcttcacaaattgaataaatgtgacatgatccttttgcatcgcaccaagggtatgaagatgtttgacatagttatttaattcattatctccgaaccattttgacccgataaacaccatcatgacatcggggtgctcctcaatgatgtccggcaaagcctgcaataatatgtgcgggcctttgactttgctaagccggccgacaaacaagacgatttttttgccgtgaagccccagctcgcttcgcatctcttcgcgagctcgctgcccttcattcgtccagcgagggtggtacgtttttaaatccacaccagaatacaccgtttttgtttttgatcgtgctgacggaaaacggcttgtgatcgtctgtccgatataatcgctgaccgtaacaatctgcgctacggagtcgatgcaaatctcgccttccgcctggctgattttatcgtaagcgaacatttcattgtgaacgcttaaaataaaaacagcatccggcgcctgtttcttcaatttcggaacccagcttgggcgattacaaacatgcacaagatcaaaacggctctttttcagctctgctccaacggcttcttcataacggtcttcatccaaatgcacataatggacaccgtctaccttctctctatcagcgagattcggatctttaatagaaaacacagtcacctcatgtttttttgcaattaaaggggcaaccgcttcgaggtagatttgaatggcgcctcctcgaaccgatgggacaggaagcttctctgtggcgatcagtgctattttcatacatagcctccattcctgcatgatttttaactagttagaatcatgatacggctgaacaaccaacttgtgcggaatgggactgccctaaaaacaaaacgggtaaacaaccagattcatctattaaatatagtcaaataactcaatcattttttccttttgattcataaggtaggagtaaaacaggtaaggatgtgtcctttaatggcagaaaaccatgaagtcattgaggaggggaattcatcagagcttcctttatcagcagaagatgcaaaaaaattaacggagctggctgaaaatgtgcttcaaggatgggatgtgcaggctgaaaaaatagacgtcattcagggaaaccagatggcgcttgtctggaaggtccacacagactccggcgcggtttgtctaaaacgaatacacaggccagaaaagaaagcgttgttttccattttcgcgcaggactatttagcaaaaaaaggcatgaatgttcctggcatactcccaaacaaaaaaggcagcctatattctaagcacggctcatttctatttgtcgtatatgactggatcgaaggaagaccgtttgagctgactgtaaagcaggacttggagtttatcatgaaaggccttgctgattttcatacagcttccgtcggatatcagccgccaaatggcgttcccatatttaccaaattaggtcgctggccgaatcactacacgaaacgatgcaaacagatggaaacgtggaagctgatggcggaggcggaaaaagaagatcctttctcacagctttatcttcaggagatagatggctttattgaagacgggctgcgcatcaaagaccggcttttgcaatcgacctatgttccatggactgaacagctgaaaaaaagccctaacctttgccaccaggattacggaaccgggaatacactcttaggagaaaatgaacagatttgggtcatcgacttagataccgtatcatttgatctgcctattcgcgatttgcgcaaaatgattattccgcttttggatacgacgggtgtttgggatgacgaaacatttcatgtcatgctgaacgcatacgaatccagagccccattaactgaagaacaaaaacaagtcatgtttattgatatgctgtttccttacgagctttacgatgtcattcgcgaaaaatacgtccgcaagtctgctttaccgaaggaagaattagaatcagcttttgaatatgaacgcattaaagcaaacgcattgcggcagcttatttaagaccatcatttcccccgcatatcgggggtttgatctttataagataaagggtaattaaatacatgcggaggttgcaaatatgaaaaagattgtcggcgctttagccgtttttgtgattacatatgcgctgttttcagccgcaggctacctgtttcctgtggaccaagaatggtacaattcattgaaaaaaccggactggacgccaagcggaactgcgatcggcatcatttgggccatcctgtttgccctgatctccctttcagcagccattgtatatgctgcgttttcatttaaaggtgcgaaaagcttttggtttacacttttgataaattacgtgctcaatcaagccttcagctatttccagtttacgcaaaaaaatctgctggctgcatcgcttgactgcctgcttgtcgccatcacagcaatcgtattactgatcattgccaaaaaatacagcagagccgcaagctatcttcttttgccttattttttatggagtgcatttgcgacgttcttatcctttacaatcaattcaatggatctgtgaacaaaaaaagccgcttatacagcggctttttcacatcatcggcttgatgccccaaatgtccttcgcatattcccggatcgtgcggtcgctggagaaatatcctgaatgagcaatgtttacaatcgaacgctcagaccatttccttcgctctcgataatcagcttgaattcgctcctgcgcatctgcatatgagctgaaatccttcagcacaaaatactcatcattatgcggaagcagcgagtcaaagatcgattcaaattcatctgcttctccttcaaaaaaaccattgatcagctgatccgctacctgcctgattcttctgtcatgctgataatattccctcgatctatagccaccattttcctgatacgatagaacctcatccgcctttaagccgaacgtgtaaatacagtcagggcccacccgctcaaagatctcgatatttgcgccgtcatgcgtgccgatcgtcaaagccccgttcatcataaacttcatattccctgtaccagacgcttccttgcttgcagttgaaatttgctcacttacgtctgatgccggaaaaattcgctcagccatagaaactctataattttctaaaaaaacaactttgatcagctgtttgactgccggatcataattgactttttctgcgacagaatggatcagcttaatgattttcttggcataataatagcttggtgaagcctttgccccgaaaataaaggtttgcgggtagattgaaaacccggcgtcctccttgaggcggttatacaaatacataatgtgaagaacattcagcagctgccgtttatatgcatgaagccgtttcacctgtacgtcgaatatgctgtcagggttcacaaccaccccggccgtgcaaaaaatcaaatcggcaagctcttgttttttcttgcttttgttgttttgaaactgttcaataaatgcaggatcagtggcgtacggttctaaacggatcagtgattccggctgtttgacccattcatcgccgatcgcctctgtaatgatggcagacaagcctggattcgcttttaacagccagcgcctgtgggcaattccattcgtcttattgttaaaacgattcggaaacagcaagtgaaagtcgcgcatctccctttccattaatatatcggaatgtatttttgcaacgccatttacactgtaactgcctactatggccagatgagccattttgacaacaccatgcgctgtaatcgccatgtcctctatccttttccagtctcccggatacttttcccaaactgcgcggcaaaacctctcattgatctcttcaataatcatgtacattcgcgggagcagcggcttaaacaaatgaatcggccatttctcgagcgcttctgacaatgttgtatgatttgtataagaaatcgtatgtacagtgatatgccaagcttcttcccagctcatgttctcttcatcgagcaaaatccgcatcagctcaggcaccgcaagcgcagggtgagtgtcattaatatgaatgctcacttttttatgcaggccggataaagatttatgtgtttttcggtaattgttcacaatgctttttaagcttgcgcatactaaaaaatactgctgcttcagccgtaaaattttcccctcatcatgggtgtcatcgggatataagaattcagaaaccgcctctgtttcccgcttataagacaaaatattaccgccgtgataatgcgcatagggctcggcgttccagagccttaacgtgttgacagtgcccgtttcatagccgatgaccgggatatcataaggaacagcggtaacaattgtcgcttgttcgtggcgaaaatgcaggcgcccgcttttttctgtcatatggacttcgccccaaaacggcacgtccactgcttgatccgcattccttacttcccatacgttcccgtttttcagccattgctcaggcagctccacctgatgcccgtctacaattttttgctcaaacaaaccatgcttataacgtatgcccatgccgtgcccaggcaggttcaacgaagcaagcgaatctaaaaagcaagcggccaagcgcccaagtccgccattgccgagacctgcatcgttctctatctgaaggatctcctctaaattgatgccgatttcctttaaaccagcttctacaacatcacgaacaccaagattcattaagttttgctcaaggagctgaccgagcagaaattcgattgataaataatatgtctgcttcccggaatttgatctgcttttttcattcgtttcgatccaatcagcgctgatatactctctgaccatattgcccaacgttttatattgatccagcttggcagaatctttaaagctttttccgcacgtcatttccagacgctttaaaaataagtctgcaaagcgttctttactcgagaacatcccgtccactccttgtcacctgctcgaaaatacgctgatactctttagccgacttcccccagctgtaatctgcattcatagcggtcttcacgatgctcttccatacatcctgttggcaataaaacgacagcgccctttctatcgtaaatttcagatcatgcgcattaaaggcggaaaacgtaaagccattgcccgttccctcttcctcctgataggcacggacagtgtcgtaaagaccgcccgtttccctgacaatcggaatggcgccatattgaagagcaatgagctgccccaaaccgcacggctcaaatttcgacggcatcaaaaacatatcagagcccgcataaatttgatgggctagcggctcatcaaacccgatataagcccggcacttctcatgaaaagcaaattctgcataccggaaataatcttcaaattcacgttctcctgtgcctagcacaaccagctgtatgtcttgctcctcaagaagttcgtgcataattctgcggacaagatcaagccccttttgtttagtgagccttgtcaccatactgatcagcggaatatcgtttttctctggaagccccatccgctgctgaagcttcgttttgttttccagcttgcatgcaagatcccctgaatcgtattgcgcctctatataagggtcgcttttcggctgatagaacgtatcatcaatgccatttaatatgccggttacatcatcttccctatattgcaaaacctgttccaactgctcaccataatacggcgtcatgatttcatttctgtaagtggggctcacagttgtcacatgatcagccgcaatgatgcccgctttcataaaattaacaaatccgttgcattctaacctttcataatgaaaatgatccatctcaagacccagcaagtcatgtgtgacatcaggagggaatatgccttgaaactgcaggttgtggatcgtgagcacgcttttcatccgttcataaaaaggatgttttctgtactcctctttcagcaaataattgaccatcgctgtatgccaatcgtgagtatgaacaatatcggctggaacattcacaactttggcagcctccagcacagctcttgaaaaaaaggcaaaccgctcaccgtcatcataatgcccgtacaacgaatccctgttgaaatagtactcattgtcgatgaagtaataattcacatcgtcttcggccatatgttcaattccgcaatattgctgacgccagccgacagctaccgtacactcagccttttttttcatacgctttttccacggttcaggtatttggctgtacttcggcagcatcacatatacttcattgcctaatcgcgcaagcgccttcggaagagcgcctgctacatcggcaagacctcctgatttcacaaatggggtgcattcagacacagcaaataatatcttcaagaattcatcagctctccttgcaccaaaccttttcttaatacaagcggctgctcagctgttcctacagcttccgtcgccttgccgattttaacgtccttatccgaaatgacctgctcaagaagacaatcctcgccaatctgcgttttttgcataataatacagtttttcagcttcgtaccctttccgacatggaccgccctgaacaaaatgcagttttcaacctctccttcaagcacacagccgtttgccaccaaagaatttttgacagtgctgtgctttccgtatttcgtaggcggctcatccttcacttttgtatagataggctgctgcggcaaaaacacctgctgccaaaaacgaggctgaatgagctccatactgtgggtataatatttttccaccgaatcaatgacagcagcataacctgaatattcataagggcaaatggtcagggcggaagattccttttcaacagcctcctgaatggttttatagcctttttcgctatgtccgtagatcagatcctttaaaagcgttgttgacatgatatagatttgcagcgactggccgtcctgaaatacctcggtgacgtcgcagccaacctcctgatggcgtttcagcacatattgaaattgaatgttgcatacggtatggctgttggagattacagcatattgctgagtgcttctgtggaagtaatctagatggtccgaaaactggcgaaaggaaccgaattcatcgtattcgtgatgaagatggggagacgggaaaaaaaagaggccgtcctttttccggtgcaaatcccattccttacccgccccaaggtgatccatgagcgaacggtaacgatacttcggaaaaattgcaacactcctaatatccgcattcaccatgttggaaagcataaaatcaatcagtcggtacctgccggcaaaagggatcgccccgagcgaccgctttgctgttaaatcctgaagagaatgcttatatgtggtttcatctataacacctaacatttgattattgaacactgactctgccccctcttcagtaattaaatcaattctttttctacaaattcctctgaaacgagcagcacctcttcaatgtctttttcggagcgaatcactgcgccatccggcagcaccatcccattaggaacaatggcattttcaatgactacatgctccccaatcgtcacatccggcattatgacggatgatgtaacagtcgtatgcttaccaacagtcacaccttgaaaaagaacggagtgagacacatttccatatacaacacaaccttcgttcacaagcgaatcttgaacctgcgcatcagatgaaataaattgcggaggctgatttggattgacggagtaaattttccatttgcgttcaaacagcttcagctccgagtcctcttttaacaaatccatattggcttcccacaagctctgcaccgttccgacatccttccaatatcccttgaacggataagcagaaagcttctttttctcttccaaaagcagaggaataatgtctttgccgaagtcgtggctagaataagggttttgatcgtccatctcaagatactgtttcaaaagcggccaattgaatatataaattcccattgaggcaagattgctcttagggaatttgggcttttcatcaaaatgtgtgatcgtcccatctggattggccttcatgatgccgaaccggcttgcttcctccaagcccacttcgatgacagagatggtcacatctgctttcttttcaatgtgataatcaagcattttgccgtagtccattttgtatatgtgatctcctgataaaatcagtacatactcaggatcatactgattcaaataattgagattttcataaatggcgcttgccgtccctttataccacttgacttctgatgactcggcataagggggtaaaaccgtcacgccaccattatatctatccaggtcccatgcactgccgatcccaatataggaattcagctcaagcggctgatattgcgttaaaatcccgactgtgtctatgcctgaatttgaacagttgcttagggtaaaatcaataatcctgtatttacccccgaaagatacagccggtttagccatattttttgttaatccgctgagacggctgcccttcccgccggcaaggagcatggctacacattgttttttcatctttttatctctcctctttttttaaccgcccgtaaaatcgagatgccgtaaggggggatggtcatcgtgatataacacggtttatgatgaagtgctccctttttagccgataatggctttttgttgatttgccctgagcctccatatgtttcactgtcactgttaagcacttcaatgtattgagtaaaaaaaggaactccaacatcatattgatgatagaccacgggtgtaaaattacaaatgatgacaagcgcctcaccgtgctttttgccataacgaataaaagaaaagattgattgttcgtcattatggacatcaatccattcaaacgattgtgcacgatggtcatgctcataaaggattttgcttttttggtaaaagcggagaagatcttgcgtaaaaacgctggctttctgatgcatggggaaggagtccaaaaaccaatcaagctgttctgtatctttccattcatcaaattgggcaaactctgatcccataaagatcaatttctttccgggatgcactgtcatatagcccagcaaaagccgatactgggcaaatttctgccagtagtcgccaggcattttattaagaagtgatttttttccgtatacgacttcatcatgagaaaacggcaatacaaaatgttcactaaacgcatatagtaatgaaaaagagataagctgatgacaatgccgcctttcttcgggcggcgtctccatgtatttcagtacgtcattcatccatcccatattccatttataatgaaaaccaagccccccttcctcaacggcacctgtcacttgaggccattctgtagaatcttccgcaatcatcatcacatggggatatgcctctctcatggtttgattgagtttttttaaaaactcaacagcatatggattcgtgtggcgttcatcctgatttggccaatacaagatattagccactgcatcaaccctaaatccatctatatgatagaattccgcccagtacaacgcattcgaaattaaaaaactatgaacttccggttttcccaggtcaaagtttgccgtgccccataaccagttctcccgatcacgttcttctttgtattcataaagcggttctccatcaaacatatagagtccatgtgcatctttacaaaaatgtccggggacccaatccaaaatgactccgatattttgttgatgacattcatcaacaaacttcatcagatcatgcggcgggccaaacctgcttgtcgggctgtaataccccgttccttggtacccccatgaacgatcatatggatgctcatacaccggaagcagttcaacatgggtaaacccatgctccttgatataagggataagcgtctgacttaattctttataggaataatgcctgccatcagaatgcttcttccaagacccaagatgcagttcataaatgaaaacaggtttttcatacagcgtcttagtcttctgtttcttttgccatttttgatcttgccagctgtacccttccaaatcgtaagtaagtgacgctgtgtttggtctgacttctgaataaatagcgtatggatctgccttcagcctgatctcaccgttattcgtcacgatttcatatttatatcgttccttttctcctaaacctggaataaataacgtccaaataccactatcattcactctgtgcatcacatgctcttctccagaccagctgttaaaatctccagccactcgtacttccgacgcatgaggcgcccacacacagaattcatatccgcttttgccattcagctcgcggtaatgcgagccaaacagctgatagctttcaaacagactgccttcgtgaaaaagataaacatcatgtgctgtcgggctggcagcggccatgtaatcatcctttctgacatcatagttttcatttatagtatttattcgaagaaataaaaaaaagccctttgctgaaagcgcttatacttatagacaattaacttcattttctgaagaaaaacgaaatatatggagatttttgtagtctgcttttaaaataaagaacaaaatctaagacatatcatgatttagaaaacaaaaaaaccttgcaggatatgcaaggcttctggatgacccgtacgggattcgaacccgtgttaccgccgtgaaagggcggtgtcttaaccgcttgaccaacgggccgataattattatacctgtaatcatatggcggagaaggagggatttgaaccctcgcgccgcttacacgacctacacccttagcaggggcgcctcttcagccacttgagtacttctccatttggctccacaggcaggattcgaacctgcgaccgatcggttaacagccgatagctctaccactgagctactgtggaatacaaaagtcatggtgggcctgaatggactcgaaccatcgacctcacgcttatcaggcgtgcgctctaaccagctgagctacaggcccatgacgatatagaaatggagcgggtgatgggaatcgaacccacgacatcagcttggaaggctgaggttttaccactaaactacacccgcaatttttatttggggcgattgatgggaatcgaacccacgaatgccagagccacaatctggtgcgttaaccacttcgccacaaccgccaaaatatattgataaatggtggctcgggacggaatcgaaccgccgacacacggattttcagtccgttgctctaccaactgagctaccgagcctaagtatttaaatggcggtccggacgggactcgaacccgcgacctcctgcgtgacaggcaggcattctaaccaactgaactaccggaccattttaaaatttggttgcgggggcaggatttgaacctgcgaccttcgggttatgagcccgacgagctaccgaactgctccaccccgcgatgattaggaatatgtatggcggaggaagagggattcgaacccccgcgggctttgacacccctgtcggttttcaagaccgatcccttcagccagacttgggtattcctccgtatagtggtggaccttgtaggactcgaacctacgaccggacggttatgagccgtctgctctaaccaactgagctaaaggtccattggtagcggcggaggggatcgaacccccgacctcacgggtatgaaccgtacgctctagccagctgagctacaccgccaaatatttttagaaatcaagtggagcctagcgggatcgaaccgctgacctcctgcgtgcaaagcaggcgctctcccagctgagctaaggccccaagaatggtcgggaagacaggattcgaacctgcgaccccatggtcccaaaccatgtgctctaccaagctgagctacttcccgatttcatatagatcatggcgcgcccgagaggagtcgaacccctaaccttttgatccgtagtcaaacgctctatccaattgagctacgggcgcaaaacttaatgccgagggccggacttgaaccggcacggtagtcacctaccgcaggattttaagtcctgtgtgtctgccaattccaccaccccggcgtggatggtatagttggagcggaagacgggattcgaacccgcgacccccaccttggcaaggtggtgttctaccactgaactacttccgcagaaatggtgcggatgaagggacttgaacccccacgtctgtaaagacactagagcctgattctagcgcgtctgccaattccgccacatccgcaacatgtaaatggtgagccatgaaggactcgaaccttcgaccctctgattaaaagtcagatgctctaccaactgagctaatggctcttcttacaagagacttgaatattatatcatataaaagtggtgccggcaagaggacttgaacccccaacctactgattacaagtcagttgctctaccaattgagctacaccggcatatatgtaaaaccgatatgtataatgaaaaatggtggaggatgacgggctcgaaccgccgaccctctgcttgtaaggcagatgctctcccagctgagctaatcctccatacttgcactaacgtgcaattgcttggcggcgtcctactctcacagggggacccccccgactaccatcggcgctgaagagcttaacttccgtgttcggtatgggaacgggtgtgacctcttcgctatcgccaccaaacaaattgagagtgttctctcaaaactagataacaggtgtgacatcattcaaaaatatggttaagtcctcgatcgattagtatctgtcagctccatgtgtcgccacacttccacctcagacctatcaacctgatcatctttcagggatcttacttccttgcggaatgggaaatctcatcttgagggggcttcatgcttagatgctttcagcacttatcccgtccgcacatagctacccagcgatgcccttggcagaacaactggtacaccagcggtgcgtccatcccggtcctctcgtactaaggacagctcctctcaaatttcctgcgcccgcgacggatagggaccgaactgtctcacgacgttctgaacccagctcgcgtaccgctttaatgggcgaacagcccaacccttgggaccgactacagccccaggatgcgatgagccgacatcgaggtgccaaacctccccgtcgatgtggactcttgggggagataagcctgttatccccggggtagcttttatccgttgagcgatggcccttccatgcggaaccaccggatcactaagcccgactttcgtccctgctcgacttgtaggtctcgcagtcaagctcccttgtgcctttacactctgcgaatgatttccaaccattctgagggaacctttgggcgcctccgttaccttttaggaggcgaccgccccagtcaaactgcccacctgacactgtctccccgcccgataagggcggcgggttagaaggtcaatacagccagggtagtatcccaccgatgcctccaccgaagctggcgctccggtttccaaggctcctacctatcctgtacaagctgtaccaacattcaatatcaggctgcagtaaagctccacggggtctttccgtcctgtcgcgggtaacctgcatcttcacaggtactataatttcaccgagtctctcgttgagacagtgcccagatcgttgcgcctttcgtgcgggtcggaacttacccgacaaggaatttcgctaccttaggaccgttatagttacggccgccgtttactggggcttcaattcgcaccttcgcttacgctaagcgctcctcttaaccttccagcaccgggcaggcgtcagcccctatacttcgccttacggcttcgcagagacctgtgtttttgctaaacagtcgcctgggcctattcactgcggctctctcgggcttgcaccctaacagagcaccccttctcccgaagttacggggtcattttgccgagttccttaacgagagttctctcgatcaccttaggattctctcctcgcctacctgtgtcggtttgcggtacgggcacctctcacctcgctagaggcttttcttggcagtgtggaatcaggaacttcgctactatatttcgctcgccatcacagctcagccttatgggaaacggatttgcctatttcccagcctaactgcttggacgcggatatccaataccgcgcttaccctatcctcctgcgtccccccattgctcaaatggtgaggaggtggtacaggaatatcaacctgttgtccatcgcctacgcctttcggcctcggcttaggtcccgactaaccctgagcggacgagccttcctcaggaaaccttaggcattcggtggaggggattctcacccctctttcgctactcataccggcattctcacttctaagcgctccaccagtccttccggtctggcttcacagcccttagaacgctctcctaccactgttcgaagaacagtccgcagcttcggtgatacgtttagccccggtacattttcggcgcagagtcactcgaccagtgagctattacgcactctttaaatggtggctgcttctaagccaacatcctggttgtctaagcaactccacatccttttccacttaacgtatactttgggaccttagctggcggtctgggctgtttccctttcgactacggatcttatcactcgcagtctgactcccaaggataagtcattggcattcggagtttgactgaattcggtaacccggtaggggcccctagtccaatcagtgctctacctccaagactcttaccttgaggctagccctaaagctatttcggagagaaccagctatctccaggttcgattggcatttcacccctacccacacctcatccccgcacttttcaacgtgcgtgggttcgggcctccattcagtgttacctgaacttcaccctggacatgggtagatcacctggtttcgggtctacgaccacgtactcatgcgccctattcagactcgctttcgctgcggctccgcatcttctgcttaaccttgcacgggatcgtaactcgccggttcattctacaaaaggcacgccatcacccgttaacgggctctgactacttgtaggcacacggtttcaggatctctttcactccccttccggggtgcttttcacctttccctcacggtactggttcactatcggtcactagggagtatttagccttgggagatggtcctcccggattccgacggaatttcacgtgttccgccgtactcaggatccactcaggagagaacgaagttttgactacagggctgttacctcctatggcgggcctttccagacctcttcatctacctcgttcctttgtaactccgtacagagtgtcctacaaccccaagaggcaagcctcttggtttgggctaatcccgtttcgctcgccgctactcagggaatcgcatttgctttctcttcctccgggtacttagatgtttcagttccccgggtctgccttctcatatcctatgaattcagatatggataccactccattacgagtggtgggtttccccattcggaaatctccggatcaaagcttgcttacagctccccgaagcatatcggtgttcgtcccgtccttcatcggctcctagtgccaaggcatccaccgtgcgccctttctaacttaaccgttaaaaagaatcactatgtgatatcttgtattactaattgaatgtgatgtctactgttatctagttttcaaagaacacgtttcgaaggaatgatccttcaaaactaaacaagacagggaacgttctgtttataagacccaaggtcttatattccgtataatatccttagaaaggaggtgatccagccgcaccttccgatacggctaccttgttacgacttcaccccaatcatctgtcccaccttcggcggctggctcctaaaaggttacctcaccgacttcgggtgttacaaactctcgtggtgtgacgggcggtgtgtacaaggcccgggaacgtattcaccgcggcatgctgatccgcgattactagcgattccagcttcacgcagtcgagttgcagactgcgatccgaactgagaacagatttgtgggattggcttaacctcgcggtttcgctgccctttgttctgtccattgtagcacgtgtgtagcccaggtcataaggggcatgatgatttgacgtcatccccaccttcctccggtttgtcaccggcagtcaccttagagtgcccaactgaatgctggcaactaagatcaagggttgcgctcgttgcgggacttaacccaacatctcacgacacgagctgacgacaaccatgcaccacctgtcactctgcccccgaaggggacgtcctatctctaggattgtcagaggatgtcaagacctggtaaggttcttcgcgttgcttcgaattaaaccacatgctccaccgcttgtgcgggcccccgtcaattcctttgagtttcagtcttgcgaccgtactccccaggcggagtgcttaatgcgttagctgcagcactaagggcggaaaccccctaacacttagcactcatcgtttacggcgtggactaccagggtatctaatcctgttcgctccccacgctttcgctcctcagcgtcagttacagaccagagagtcgccttcgccactggtgttcctccacatctctacgcatttcaccgctacacgtggaattccactctcctcttctgcactcaagttccccagtttccaatgaccctccccggttgagccgggggctttcacatcagacttaagaaaccgcctgcgagccctttacgcccaataattccggacaacgcttgccacctacgtattaccgcggctgctggcacgtagttagccgtggctttctggttaggtaccgtcaaggtaccgccctattcgaacggtacttgttcttccctaacaacagagctttacgatccgaaaaccttcatcactcacgcggcgttgctccgtcagactttcgtccattgcggaagattccctactgctgcctcccgtaggagtctgggccgtgtctcagtcccagtgtggccgatcaccctctcaggtcggctacgcatcgttgccttggtgagccgttacctcaccaactagctaatgcgccgcgggtccatctgtaagtggtagccgaagccaccttttatgtttgaaccatgcggttcaaacaaccatccggtattagccccggtttcccggagttatcccagtcttacaggcaggttacccacgtgttactcacccgtccgccgctaacatcagggagcaagctcccatctgtccgctcgacttgcatgtattaggcacgccgccagcgttcgtcctgagccaggatcaaactctccgataaatggatcacaggttaagttcaccgcatcctgcggcgacacctgtgtgacctgcgtcgtgcagaccctagtttgactgactacgcacatcgctgtgcgatttttaaaaactgaattaacaggtacgttttgtcttgtttagttttcaaagatcatttcgttacttctcaatgaagcagctttactaatataacattcagcttcttttttgtcaacaacttttttcaagttgttttgaagcatctagtttgtgtccgctgtgcatcagcgacgtttaataatataacacctgtatttatttattgcaatagtttttttaaaaaaatctataaaacaaataaactataatcctcgccatgatttctaaagcgtgtgtatcatataagtttcttaaaagaacatatacatcagtcatgtgatcttgttgtttttttcgttttcttgtatagtagaaacgaactaaatactgatgaccacaaggggagcattaaagctgagagtgagcggtttcgttctgaccctttgaacctgttagttaacgctggcgtagggatgtggcaaagtcaaatgaattgcagatcgtaaagcagtgcgtggaacttttctcatccttccgcgtgctgcttttttgttgtccttttggttgtctgtcaatggaaggagatagatatgaatcaatctaagcaactggttcgccttattgaaattgccattatgacagcggcagccgttattttagacattgtctcaggaatgtttcttagcatgcctcaaggaggctcggtctccatcatgatgattccgatctttttaatttcgtttcgctggggtgtcaaagcaggtcttactacaggtttgttgacaggtctagtacaaatagcaatcggaaacttgtttgctcaacatcctgtacagctattgttagattacattgtcgctttcgcagcaatcggcataagcggctgtttcgcttcttctgtccgtaaagccgctgtatcaaaaacaaaagggaaattgattgtttcagtggtcagcgcagtttttatcggcagtttgctgcgctatgccgcgcatgtcatttcaggagctgtgtttttcggcagctttgctccaaaaggaacaccggtatggatttattctttaacttataatgcgacttacatggttccttcattcattatttgtgcaattgtcctatgtttattatttatgacagcaccccgtttgcttaaaagtgacaaagcgtaaaagtaacaatcccccagcgaattccgctgagggattgttcgttatctgttaagaagtgtttttaaagctgaaagatccggccagccaagacctacttctttcagccttactccggcaatttcaaagttgtcctccgctactctttcaggtgaataggcctgataaaatataattgagggattctgctcaataacccaaacaaacatacttgaaaatccatgttgaagcaaaaactccgctccttttgctaagagcgccctgcctgcaccttgccgctggcgctcttccagaagataaatagcgtataactcgccgtcatagccttcttgttcagagcgaataggtccaaatgaagcaaagccgaatactgaatccatttcgtcctgagcaacaaatactccttttaacgagcgacttttccatttgtcttcaaattccttatagttcaggctgtttaaataatcaatcgggataatttcgtggtatgttgtcctccagctgtctacatgcacttttgcaataccctttatatcctctaacttcgcttcacgtacagttaccatacggttctgtcctttccttactctgatttttggaccgttttggcttctttgatttcatttgttaattcattgatgctttgttttacgtttccttttcctgaaaagttctcaagcatttcttttacatcgattcccgaggatgcttttaaactttcttgcagacttgacattaagttcgtcgcatagctggttactttgtttgctccgcttgattcaccgcttcctcctgtatcgacaacggtgattttatcaatatttgaaagaggtgccgctgcttgtttcgcgtattccggaagcattttgacaatcatatcgaaaatcgccgcctgcccgtactgttcaaaggcggccgcaattttctcttttgcttccgcttctgcaagacctttcaggcggataacctctgcttctgtctctcctttcgctttttccgcttctgcttttgctagcccgtcaattcttactttttccgcctcagcctttgccattgcttcaatactgtacttcttggcatcggcttccgcgagctgtttggctttctcagctgctgcggactgctcaacagaataacggtctgcatcggcttttttctttacctctgagtcgtattgacgttcacggcgaagaatttctttttcttctagttctatttgtttttggcgttcgataattttaacctgcatttcctgctctgtgacttgctggcgcgctcgggcagtctctaaatcatatgcttggtcggcattcgcttttgccgtatcttgttctctgcggaattcagccattttgagctgattgattttttcagcttcagcgatttccgtcgcccgttcaagttctgatttttttgcgtctttatcggcttctgcccgcttaattcgggtttctttatcagcctctgctgttgcgatatcagcatcgcgttttacttgggcaattctcggtttccctaatgattcaagataaccgtttttatcacgaacatctttaatggtaaacgagacgattacaagtcccattttcgcgagatcctgtgaagcgacacgctgcacctcttgagagaatttttctctgtttttatagatttcttctactgtcattgagccgagaatggaacgaaggtggccttctaaaacctcccgcgcttcctgctcacggtcgtcttttgatttccctaaaaattgttcggccgctgtagcgatttctcctatagaaccgccgattttaataatcgcagttccatcggccattactggcactccttgttctgtatagacttcaggtgtcgaaacatcgagtttgcttgataataggcttagcggctctgcctgctggaagacgggaaggacaaaggttcctccgccgcggacgattttaatacggttgccgccttcatcgacatgaacatttttattacccagatagctccctgttacaattaacgcttcatcaggccctgctgtacgatacttcgtaataaacacagctattagtgcaattaataaaaagaatacaactccgatgatcattataatcggcattgtcatatcaaattcctccttttatgttaaatgggttcatgcggagtaaccgaaagaactccgtttttgacatctacgactagcactcttgtgccataaccgatctgttgattttcaaagctgatcgctgacttcgagatggtgccgcctatcccttcaatgaccacttcaccaaacccgtcaacaggaacagctgtaatcactttaccgagtcttcctctgagatcatcttctctatatgccaatgattcttctgcagatgataatggtaccagtacaaagatgtgaagcaataccaccagcatgatcgaaaggatgcaagataaaagcgcaatcagcaagcttgacagaggcaatacgagttcacctatatatccgtccgctgaaaaacatgtgaaaaatgagagcactaatgtcggattaagaaacggaatgccttctggcagccctgcaaatacatctccgaaaaacagaaataacagcgtaaggctgcccgcaataataagcgtataaagataaattgtttgtataggtactccaaataactccaatttcctcatcctttcttcatcaatgcattgatgaacggctgccgttaccattaatacgagacaccccgggaaaagtttcaaaattttaagataagtaacccatttgaagtgctttataaatgataattgcttatatatatggtaatgtcattttaggaggagatatgatgagtatctttaatgaagccagattagaaacgtggaacgaattgaaaggactttctgacgaaaagctgaatcaaaagccttctgctgaagaatggagcatacgggaagttcttgaccatttgaaaaaaatcgatatgaccgcacaaaaaatgttgaaggaacgtgtacaggacgctccgattaaagaaattgaagaaaaaccgcttgaggtagcacaggacagaaataataaacggaaagccccgagtcatcttgagcctgcgcatgattttatttcaggcagccaaatgaaacgtgagcttgatgtggtaagagagcagctgactgctgcgattgcctctctgaaagaagaagattttgaaagagtgcttccgcatcctgtgtttcaagagctgactgtcagacagtggatcgattttatcggccatcatgaaaaacggcacctcagccaaatgaaagaaattaaagaaaagatagaaagggcctgatttaatcagaccctttctgcttttcgtttgacttttcgctgataggaatgaacttctatttcatcacctgtgtaaacagcaccaggtctctccacaatacagacaacccctctaatgcccagtgcgtggcggacgaaagccggcgccagcttcggttggtccggataataagactgaatgacttctcccggctggatacacggatcattttcgccctcacacagcagagccgctccgctcggaaaaataatccggcttccttcttttaatgaagtaagatctggcataccgctgactgccacattcgccccgagccattccggcaaaattctcggcactcccatttttaaagcgatttcgttgcattcctctattgaaacaattgaaatttgtctgcggttgaaaatttcagtccctcttgaaaacattggttctctggctcccgcttttttggtcaggccaaaatgcaagtcgccggggatgccgccataatcaaaatcaagcttgtccatttgctttgttacgaagctttctgtatctgcgatatataagccttccgcttttgcagtcatacgcttccacatcagctggcaccttccttcttatctaaaatttccgcctatgcttcattatcccaaaaaatcccgctctgtaaaggagcgggattttgattataccgttttaggcgtaaggttaaagcagcgcttgtagatccagttgtatgctttttcatttaaatctctagggtttccgaaggtttgcggatctttcattgcttctttagacaagcgttcgatcatatcaggtgatactccctgctcttctaaagtcagcacttctaaatcttcgaccagatcatacatccaattgacagatgctttcgcagcttcttctgttgtcatcttgcttgtatcaataccgaacgctttcgcaatacgcgcaaacttctcaggatagcccttccagttgtattccatgacagggcccatcatcgccgctacacattggccgtgagcgactgggataataccgccaagcgtttggctcatcgcatgagccgcgcccgctgattcacttccgtaagaaaggccggcaagcatcgctgcctgcgccattccgtaccttgcttccagatcctctccgtcagcaaatgccctcttaatgtaatgagcggcatactcaatcgccattagggcaaccgcatccgtgattggctgtgcaaatttcattgtatagcactcaatggcatgggcgagcgcatcaattcccgtcatagctgttacatgcggaggcattgaaacatgaagctcaggatcaatgatggtcaagtgcgctgcaatcagcggaccgcccgtgttgaatttgaattctctttcttcatctgtgataaccgcccattgggttacttctgatcctgttccagctgtagtgggaattgtcgtcagcggaggaatgcggttttccagcggttttttcccatctgccgcttcataatcaagcacgcttccttcgtgagtcgcttctactccgattgcttttgctgtatccatggagcttccgcctccgactgccaccaaaccattacagttctcttttttgtaaagctcagatccttcattcaccagacggacaggcgggtttggctcaactttattaaagagcaccacttcaatgcctgcttctttaagtgattcgattacaggatcagcaacaccggctttataaatccctgggtctgtgacaaggagcgcttttgaaacgcccagtgcagctacttcctcacccgtatgcttgatggctccgattccatgcttaatcacagtcggaatttcaaatgtgtggaatttctgcatgctttctaccttcatatttaatgtcatcatcaatctccccctcttatgaattgaaccagttaaccgctgccggttttgtattacggtatacatgtttgacttctgtgtattcttcaaggcctatttttccaagctcgcgtccgaacccggattgcttatatccgccccatggcgcttgtgcaaagtacggatgaaaatcgttgatccaaacggttcccattctcaagcgggctgctacccgttcgcacttttcaatgtcttttgaccataccgctccagccaagccatagatggtatcattcgcaagctcgattacctcttcttcagagctgaaggtttcgactgtcaatacaggaccgaaaacctcttcctgaacgattctcatgtcagaattacagtttgagaaaatagtaggttcatagaaaaagccgttttgaagctcaggatcttccgggcgtttgcctcctgtctccagcttcgcgccttcctctattccgatctcaacatatttttctacctttgccctgtgctccgccgaaataagcggaccgctttctgtctcagcatgaaaaccgtttccgagttttatgcgttttgcccgtttgaccagctccgccaaaaattgatcatgaatggcatcctcaacaagcaagcgggaacctgcagagcatacttggccggcgtggaaaaatacagcgtttaaggcctgatcaaccgcaacttctaaatccgcgtccttgaaaacaatatttgggtttttcccgccaagttcaagggcgatttttttgacgtttccgcttgccgcccgcatgatttttttgcctgtttcaattccgcccgtaaacgaaatcaaatcgacgtctttgtttacggcaagctcgtcgcccactgtggctcccggtccaaggacaagatttgcgacaccttttggtacaccggcttcttccatcagcttaaagactttgattgtcgtcagcggcgtaatctcactcggcttcatgacgattgtgtttcctgcagccagtgcaggggcgattttccagctcgcttgaaggagcggataattccatggagtgatctggccgcaaaccccgattggctctctaataattttgctttctgaatcaggaatcggagatgaaatgatctctcctccatctttgtctgccaagccggcgtaatattgaaaaacattggcgatatcgtccatatcggccttgctttcttcgagtgtttttcctgtatcaagagattcaagctcagccagctcctcaagatcgcgtctgattaattccgcaattttcagaacaatttttccgcgttcaagcccggatagcgatgaccattctcctttgtcaaatgctctgcgtgcggctgcgattgctttgatggcgtcctctcgccctccctcgcttacagttgcaatttcttcttgattaaatggattgataatactgcggatctgttctttttcggcactgatccattctccgtcaatgaataatgtttgactcatataagcctccttgacgtaaataaagtttgttaaataaaaatttaatgtttttaacaaccttaatctaacatatggtttttaaactgtcaaagtcccattttgatttttctttttgacttttcctcatgtttcgttaagataaagaacataaagaaataacttaacgaatttaattttctaaaggaaaagagggtcagtatggatgaaaatccagaatttgcagctatagaacaggctcgggatcttgttattgactccattgctgaaacgatggatctttacggaattacccgcagtgtcgggattttatatgggacgatgtatatgagggatgagatgacgcttgacgaaatgcgtgaggagttgcaaatgagcaaaccaagcatgagcacaggcgtcaaaaagcttcaagacttaaatgtagtgaaaaaaacatttcaccggggcatccgtaagcatacatttgtggctgagaaggatttctttaaatttttcacaaatttctttccacctaaatgggagcgggaggttcaagtgaatgtagcagcgatcgaggaagctcaagctgatttacaaaaggttttatgcaaggaagatctcgatgaggatatcaaaaatgaagcactgcagttatatgatcagctggaaagctctaaagcttactatgactggctgaaacggcttgctgaatcggtgcagaccggagaaatttttaaatttataccgatcgaaacaaagtaaagcagaaaacgcctgggaaagcaggcgtttttttgatgtaactactacaaatttgaaaaatacgggaaaaacaccccatttacttccaaaatatttgatggtaattttatgtaggtaaaatttgtatttggcctttcagaggaggtgaaaagcgggcaggcctgtttaatttatcattttttagggggaattttgttatgaaacgcaaattattatcttctttggcaattagtgcattaagtctcgggttactcgtttctgcacctacagcttctttcgcggctgaatctacatcaactaaagctcatactgaatctactatgagaacacagtctacagcttcattgttcgcaacaatcactggcgccagcaaaacggaatggtctttctcagatatcgaattgacttaccgtccaaacacgcttctcagccttggcgttatggagtttacattgccaagcggatttactgcaaacacgaaagacacattgaacggaaatgccttgcgtacaacacagatcctcaataacgggaaaacagtaagagttcctttggcacttgatttgttaggagctggcgaatttaaattaaaactgaataacaaaacacttcctgccgcaggtacatatactttccgtgcagagaataaatcattaagcatcggaaataaattttacgcagaagccagcattgacgtggctaagcgcagcactcctccgactcagccttgcggttgcaactaatgtaaaagaccggttaacgccggtcttttttgcgttttaccctcccctttttctctaattcccgttatcttttttctggtttaaaatttaaattgacaaacactagaaacaggagtaaattcttgagtgttcaatttcatacagtctcttttaccgcttaatcaaacacgaacgggggaaccaacgattggctgttttattaacagccttggggtgaatcttactaagtaagagggggtactctgaatccctaatccgacagctaacctcgtaggcgtatacagagaggaggtctattatttggccattctttgcaatggtcttttttgcttcagaaacgttaattcactaagggagatatgaacattgggaagaattaaaaataagcaatttgccgtgatcggtctgggccggtttggcggcagcatttgtaaagaacttcatagaatggggcatgaggtccttgcggttgatatcaacgaagaaaaggtcaatgcatatgcttcttacgccactcatgcggtaattgccaacgccaccgaagaaaacgaattgctttcattaggaatacgcaattttgaatatgtgattgttgccatcggagcaaatattcaagcgagtacgctgaccaccctattattaaaggagcttgatattccaaatatttgggtgaaggctcaaaactattatcatcacaaggtgcttgaaaaaatcggcgctgaccggattattcatcctgaaaaagatatgggagttaaaatcgcacaaagcctttcagacgaaaatgttttgaattacattgatctatctgatgaatacagtattgtcgagctgctggctacgcgcaagcttgattcaaaatcgattattgacctgaatgtaagagcaaagtacggctgcacgatcctggccatcaaacatcatggagatatctgtctttcccccgcgcctgaagacatcattcacgagcaagattgcctggtgatcatgggccacaaaaaggatattaaacgttttgaaaacgaagggatgtagacaaaggtgacacttcaaaaggataaagtgatcaaatgggttcggtttacaccgcctcaagtgcttgccattggttttttccttaccattatcatcggggctgtcctattaatgcttccgatttccactacgaagccattgtcatggatagatgctctttttactgcggcttccgctacaactgttacagggcttgctgttgtcgataccggtactcaatttacggtattcgggcaaacagttattatggggctgattcagattggcgggcttggatttatgacgtttgcggtcttgatcgtcatgatattaggaaaaaaaatcggattaaaagaacgaatgctcgtccaggaagccttaaaccagccgacaatcggcggtgtcattggccttgtcaaagtcctgtttctgttttcgatcagtattgaattgatagcagcactcattttatccatccggcttgtacctcagtacggctggtcatccggcttgtttgcaagtttgtttcacgcaatatctgcttttaacaatgccgggttttcgttgtggcctgataatttgatgagctacgttggcgatcctacagtaaacctcgtgattactttcttatttattacaggagggatcggatttacggttctgtttgatgtgatgaaaaatcggcgttttaaagctttttctttacatacaaagctcatgcttacaggaacgctgatgttgaatgcgattgctatgcttacggtctttattttagaatacagcaaccccggcacgctcggccacctgcatatagtcgataaactgtgggcgtcctattttcaggcagtgacgccgagaaccgcaggcttcaattctctagattttggaagcatgagagaaggaacaattgtatttactttattattgatgtttatcggagcaggaagcgcatcaacggcgagcggcattaagctgactacgttcatcgtgattttaacatctgttattgcttacttgagaggtaaaaaagaaacggttattttccgccgttccatcaaatatccgattatcattaaagctttagctgtgagcgtcaccagtttgttcatcgtgtttttagggattttcgccctgacgatcacagaacaagcgccatttcttcaaattgtgtttgaaaccttttccgcattcggaactgtcggccttacgatggggcttactcctgaactgacaacagctggcaagtgtatcattattgtcatcatgtttatcggaagaattggtcctttaacgttcgtgttttcattcgcaaaaacagagcaatcaaatatccgttaccctgatggcgaagtgtttacagggtgatatcaaaaaaatccggcgtgcagtcgccggatttttttatgattcgatatgagattgattttgtcttttttcctgttccgcgatgatttcattatcctccgcgttatcacgggttactttttgtgtaagaatcgcaccaactgctacaagtatcataacagcgatgtaataacctttttcattgagttccaggttatcagcattatagagtccgatactaaacaaaaatactcccgcaaaaaaagtaaaataagctaatactgtaaaggcaaccgtgtttctgcgtctatatttctgcacctttgttccctcccgaaagcatagttaaaaagtgataacttccgtggaatattatacctcaaattccccgtaatggaacaaagaattaaaaataccagtaaaaagggcttaggttgcctcctttatttcaacagctgaatcatcaatccagccgataagtttatcattgatttggaattggtaccatacagactggcctttctgttttttagacacaacctttatgtctttgccgacgtaagattgggcagaggtaagccttatggaccgatcatcagtagagggcttggaccatacgtcttgaacggcactgtctttaatagaggcgtttaaatccacagatttgagggatggatttacctcatcgtactcatctaaatcgtatttttccacaatagcgctgattttgtcagcgtagtcagggtctgtagcatatcctgatgtttgcagggcggttgccgcttccttataattccctgcctcaagcaccggtttatacttctttttattccacgatgtgccacgaacgaacaattgggcgtgatcatccatagattcaaaaaacgtgctgtattttcgaaacttcgcgcgaatggtttttcttttccctttttcaacttcgtccgtttccatcgtgacatgatggcctttataattcccttttacgccaaaaaggttgttggccttagcagccagttcactgttcccccagtccgattcgagaatggcctgagcaattgtgatgctggggagaacatggtatttttcatacaaaatttgggcatgtccggacagactgtctataaatacttgctgttcatcgatttcttcagtttctttggatatttcaatcggttttgataaagttgtcgctaaaacaaacagagctagcggaatcgatacaaggaaaaatagtgaaatcaagagtttacgttttttaagttttttacgggccatgaaaaccttccttcgaattaaaagattacgaatgtaaaagaatctaccttttagaattttacttgcacttctaatatttttcaattctttagggataaagttgggaaaagattgcaaaataaaaaccttttcgctcaatgaaaaggtttttaccatgtttctatttttgtaaatttctgagtgcattacgatattccgtatcatttattactttatatgatttgacagttgccttcgacaaaccttctgctgaaacggccggtttttccggagctgttttcgctttatcatgtggtttatgtgccagcttgtgccccattccagtggcattcatacaaaatgacaggcagacgagcagcacgctaaggataaaagaaatgaagaagagatcatgataagcagtcatcatagaatcctgttccgaaccgctttgtctggcagcatcttttttcgtgaaaaagccgatgagaatgggaactcccatatagacaaacaatcttaaaaactgaacagctgtcattctcttgaccaaatcaggcagcgggcctcccatggcagctcccatcagccctgcggcgactgtcaggcctgttcccgctgcaagcatgataaacagtgccgcgaacatataaagagatgatcgatcctgtatatgcagccattgaaaattcacaaaaacgagaatgagtccgccgataataccgagcatccctggtccgactttatcatataacagagcgcttaaaatggccgcgatcgccactccgattaaaagagtcaagtttaaaaaaatgagatgctcctgagaaatatcatacatttgacggagcaagccttgaaaagcagacaggctgacagctaccgttatcgtccctgcagctatgatcaataagccaagcaccggttttggcagcagcatcagtttaatagatatgaaggggtttttcactttatattccacaatcaatagaccaatgagcaaacataacgtcaccccgaaaccaatccatacataacccgatgacagcccccatttttgcagaaaaatgaatgaaaccgctgaggctgcggcaaggaagacagataaaagaattcccgcacgatcaagcggctgttcttgatccgccgctccgtgatgctcatcatgaagaaagaaatagctcaccgcgacaccgatcagggacaaggtgccaaagatgataaacagccatctccaatgcccgcagcttgttgcaatggttcccaggattgtaccgatgataacagaaccatagaatcccccgatcagcacaagcagtgcatagttcctgcgttcaatcgggaatgacagtacaagcattggaatcataatcatcagcatgacgcctgttgccgccccctgtaaaaagcgccctgccgccatccatgcaatatcgcctgaacatgcgatgagcagtgagcctagtataaagacaggtaatgaagccagatagacgggacgcgcaccgaattttttcctcagcagcggtcctgccggaactaacaaggcaaaggccatattgccgatcaatatcgggtttactaatgtgaagacacttgttccaaccgctttctgaacaaggccttgaactgacgacaatgccgtgttagacatcaatcccggcccgaccgctaagacggcgagcaaagaaatcacccaatagtgttttgtcttcatgttgtcattccttcctatatgaatacatgcgaaacacatcattttttgaaaacaaaagaagctaatagattttgcataccattagctttcattctaatattctccctttcaggggaaatgatattattttattataattatgtgaatgaatgagcatataatcaaatattatttcaaatcgattgtgttttgtcaatggagtaaatttcaagcacaacatagaaagcttgaaagcttttccccgatattgtgtctagaactgcacttatgaatccctgctcgttccctcaagcgaattaaagcaggccgttttaatcctttcaatccactattcccactaataaactcgaataagttggtgataagacaacattttgcccccacatttttttgtgttcactgggcgtttgccgcctctaaattgtatatgggtaaataccatgaattaacctatgaaataccaatgtaaggaaattctaaatattccgggaggcaaaaacgaatggaactgtatgagtgtatccaagacatttttagcggcttgaaaaatccatcggttaaagatttagcaacgtctttaaaaaaaattccaaacgcagcaaaattaagtcaaccgtatattaaggaaccagaccagtacgcttacggccgaaatgccatctatcgaaataatgaattggaaattatcgtgattaacattccgccaaacaaggagacaacagtccacgatcatggtcaatccattggttgtgcaatggtgttagaaggaaagcttcttaattctatttatcgctcagccggcgaacacgcagaactctccaattcatactttgtccacgaaggagaatgccttatttcaaccaaaggtttaattcacaaaatgtctaatcccacatccgaacgaatggtgtctcttcatgtctactcccctcctttggaagacatgacggtctttgaggaacaaaaggaggtattggaaaattcatgattgacagataaactgctcactttgacttcgctcaactggaggattcagagaatgaatcttttcctcaaaacaaaaaaacccttatagaataagggtttacaggtatggagccaagggggctcgaacccctgacctctacgctgccagcgtagcgctctcccagctgagctatggccccgtatgtaatgtcatgtttattatagatgattttattttgaaaaacaagctgtttcctcttgaattgacagaaaaaataaggctcgtaaaagagccttattttcgacttacatcatgatcaaaagtaaaatcacaccgagaataattcgatagattgcaaatgggacaagtttgattttgttaatcagccttaagaagaaacggacgacaaacagtgcgacaacaaaggcacagataaagccgacgatgaaaaatggcatcagatccgagcttaagctgtcccaatgcttcacgaggcttagaaagctggctcccatcatgatcggcatcgccataataaacgtaaagtcggctgcagctcggtggtttaatccgagaataacaccgccggaaatggttgaacccgaacgcgagaaacccggccaaagggcaagacattggaataagccgacggctatcgcctgtttataggaaatgcggtcgagtgtgtctgtcgctgttttccgtttattgacccagtcagcaaaaagcatgaggattgccccggcaattaaaccgatggccacagttttaacggaaaataaatattcatcaatgtaatcttcaaacaaaaagccgagaacagctgcaggcacgagtccgacggcaatttgggcaatgcttaatttatgtccctgctcctggtcgcttgtaatattttttttcaagcccagtaagtttaaaattcggtctttaaacacgatagctactgctaaaatggagcctagctgaataaccaccttgaatgagttagcagcttcttctgacatcagattacttgatttaagccagatgtcgtctactataatcatatgtcctgtcgaagaaaccggcgcgtactctgttaatccttctacgattcctaaaatggcggctacaaacaattcccatagagtcatgattttgattctccccattagacatttatttttttacataacgggagcttcccataaatggaaagcccgtcttatataactataaacgaaaatcacactttatgccccggcgtattttcatttttttcttcatcgtataaatgtgaccgcattttaaaccagtcaaataaatgtgtcgtaatgactttggcaaccgcatagccgggaatcgcaagaatgattccaacaacgccgaacagcttgccggctgttaacagcagaaaaataatcgtaatcggatggatgtgaaggttttttcccataatttgcggagagatcagcttcccttcaatcagctgaacaatcgtccaaacgatcaccagcttaagcagcatgagcggcgatgtcactatggcaatgataatcgcaggcgtaatggcaatcgttggccctaaatatggaacgatgcttgtgcaagccgcaatgactgcaagcaatgaagcataatccagcccgataatcaaataaccgataaacagcaaaaacccgatacagaagctgacaatgatctggcctctgatataagagcttaaccgatgattcatttcgcttaagactgtgtatgtctgttctttcaattgcgtcggaacaaacttcagtatgtagaccggcaatttttttccgtcctttaacaaatagaaaaggataaacggaaccgtaacgattgaaatgataatctcagtcagggcgccgataaaattcccaacgccggtaaaggtactgttcacaattgtcgctgcctgatctgaaacctttgttgcgagatcagatatattgatgttcgtcgtttgctgggcctgattgacgaagttgctgccgatcagctgtttcgtctgattttcaacgatatccacatatcttgggatgttgtcgattaaactcataatttgttcttttaagaagggaatgatcgacacgattgtgatcgtgatcagcccgataaccaatagatatagcagcaatatagaatagattcttcttattcttcttctctcaaggaaatcgacgaccgggtttaacagataaaaaacaatgcctgtcaaaataatcggaagtgatatcgttttgagcaaaacaataatcggggtgaaaataaatgatgtttttgtaaatactagaatatttaaaccaatcagcagcagcacaagcaaaaataaaacaaacttattatccaagaagaatcgcttgaatctgccgctccatgtttgcaacgtctccactatcgttcctccgtcatacatagtttaattaaattgtacactatcgtccctataatgaaaaataaaaaccgttaattgctggaaaagctttcacggttttaacattctatttatatctatcatgtgattttgttctttttaagctataatttagctatatcatgcaaaaggagcgatacgagtgatacgttttgcaataataggaaccaactggattacagaccgctttcttgagtcagcagcggatatcgaagattttcagctgactgctgtttattcaagatcggctgaacgcgctggcgagtttgctgctaaacacaacgctgcgcatgccttctcagaccttcaggaaatggcggcgagcgattgctttgatgccgtatacatagcgagcccgaacgctcttcacaaggaacaagccgttctctttatgaaccatggcaagcatgtgctttgtgagaagccgtttgcttcgaatacaaaagaaacagaagagatgatctcagcggctaaggcaaacggcgttgttctcatggaagcaatgaagaccactttcctgccgaatttcaaagagctgaaaaaacacctgcataaaatcggcactgtccgcagatttaccgcaagctactgccagtattcctcacggtatgacgcgttcagaagcggaactgttttgaatgcgtttcagcctgagctttccaatgggtcattaatggatattggcgtctattgtatttatccggctgttgtgttgtttggcgcgccgaaggatgtaaaagcaaacggatatgctttatcctccggagtggacggagaaggaactgtcattctgtcttacgacgggttcgaagctgttctgatgcattccaaaatctctacttcctatgccccggctgaaatccagggtgaagacgggacgattgtaatcgatacgattcaccggcctgaacgtgttgaaatccgctaccgggacggccgccttgaaaacatcgcgatccctgatcctaaaccagcgatgttctatgaagcagaagaatttgtcacgctcataaaagagaataagctggaatctgaagaaaatacatttgaacggtctttgaccactgcaaagattatggaagaagcaagaaagcaaatggggattgtataccctgctgatcaagcttaaaaaaatccgcccgcgtgcaaatgccgcggcggattttttattaggcaatcggagaagatgccttcctttttaaaagcacctgttgctcatattctttgatgtcatgaagccatgcctcttttaccggaacgcccatttgctcacagtaggaatcccagatggctccgaaaggatatgttttgaattcctccatcagggccagcctttctgtatagcggccctcttcctgcaattgttttaaatatccgttcgggagaagcagggcatacaataaagctttgatcatatttctcgttccgatggtccaggcggctacacggttaatgctggcatcgaaaaaatccagaccgatggcgaccttctcaagagcatgatttcgtacaatttcaagagcgatttctctcaattcatcatccaaaaccactacatggtcgctatcccaacgaacaggccgcgatacgtgcaaggcaagcttgtctgtgtaaagcagcatggacgagatcttgtttgataccgtctcagtcggatggaaatggcctgtatcaagtaaacaaagcttatgattcgtcaaagcataagctaaataaaattcatgagatccgacaacatatgattcggagccaagcccgaacagcttgctctcgattgcatcaagattgtgttgttcactgatctcctctgcgaagatccgatccagtgattcttttagtcttttacgcggtgtcagcctatcactcgggatatccttatagccgtcgggaatccaaatattcgtcaagcaaggtgttcctaattctttcccgaagtattccccgatacggcggcaagcgatgcaatgcctgatccaaaattctctgatatccggatcagggtgtgaaagggtgagtccgtcagccgctttctcatgcgaaaacaaggttggattaaaatctaaaccgagaccaaggttttttgcccatttcacccagttttcaaaatgctgcggcttcaattcgtcacgttctaccgcttccctgtttgtttctgcgtatatcgcatgcaggtttacgcggtgctttccaggaatgagagaaagagccttctccaaatctcttcttaattcttcaggagtttgcgcttttccgggataattgccagtcacgtcaattccgcctgaaagctcgcccttatttacttcaaagccttcaatgtcgtcaccctgccagcaatggatcgaaatgggcacttgctctaattgccgaagcgcctcttcaacatcaattccccatttttcatatgcctgttttgcactgtcataattggcttttatggtcatacggctctctccctttatcagttttttaatccaaataaaaaacttcctttagatctatcgaaacaggactgaaatccgaatttgttttcattaatggcgccatcgatttccaccatcttcggcaaacttccgtgtccgccatctttctccatttctcttcatcctctatttctaaatatgcaaaaagcctgcctgtttcctcgtctagaaaaatggaataatggtgtgctccatgagctttgagtgcttctgccatctcaggccaaatgtcatcatgccgctgtttgtattcttcgtacttgtcttgatggacaaacatgatactggcttttcttttcaaaccttttcacctcttcatcatttagatagcgctttcaaaacagtttgctgaaatgactgaatgatcgtgcttctgtcaatgtctttaggtgtaaacactttgatcggaaaggaatttctgacgacttgccgggcttcttttatgtctttgacttctttggcagcaatcatttgcatcaaaagatttccggtggcagttgcctctatcggccctgcatataccgcttttccactcatgtctgccgttaattgatttaagaaatcattccgggctccgccgccgatgatatgaaattgctcgatcggtttttctgtgattgtttcgagctctttgatggctatcgcatagatgatggctaaattgctgtagatgcagcaggcaagttcgcctgcagtgcgaggagtcttttggcgggtttgtctgcaataatgttgtatttcctttatcatgttttctggattcaggaaacgtttatcatttaagtttataaattgctggaatggttctgtttttttggcttcttctgcaagctgctggaaagagtaatctgcttgtaactgttgtctgacttcttgtatcacccacatgccgataatgtttttgagaaagcgaatggtgttgtttgcgccgcgttcatttgtatagttgttttctaaagcaagatcagttattatcggtgttttgttttcaaccccgattaacgaccatgttccgctgctgatatacgcccagccatcatttattcctggcgctgcaatgacggccgaggccgtatcatgtgttgcgactgtcatcaccttgcacgccgggagatcataatccgggaaccactcatttcttagcttcccgagttcacaccccggttcagtcagcggggcaaattgctgttcctgaacggacacggcttcaagcaattcaggatcaagatttcccgttgaggcttttaaaagctgtgttgtggacgcatttgtgatttccgttacagcttttccggttaaacaatagcctaaataatcaggaatcatcataattttgtctgtctttatcagcagctcacggtcttcctcatacaattgatagatcgtgttgaaaggctgaaattgtattcctgttttttgataaattgcggcttttgagagggtatgttccagtttgtctattgtgtgatctgttcttctatcacggtaggagattgcttcccgcaaccgatcgcctttttcgtccagtaagacataatcaactgcccatgtatcaatgcctacggtgcagtgttcatacccaagcgtctttactttttgcagtccttgcaggatttgttttagcaaatgatcaatatcccaaaagcaatgcccgtctctttgactgaaaccgttagcgaacctgtgaatctcttgtatgtcaagcttcccttcattcagttcacctaccatgattctcccgcttgatgcgcctatatcaatggcagtataaatcatcctttcaccctctcttcgaaagaggaacagctgtcaccttcacctttttgtcctcaagagcttttaccgatgccggatcaagtccagaatccgtaataaggcggctgacatcttgcagcgaggcaatatgtgaaaactcgcggttcccccatttgcttgaatcggccatcaaaatggtctggtccgacctttcgatcatccgttttttgagcagcgcctgccactcatttgaatcactcatcccgttgtgtacgtcaaatcccttacatgacagaaaggttttattgacatgataggtctcaagtgaacgctctgctaacggaccggcaaatgataatgatttttccagcaaaatgccgcctgttgaaatgactgatatgttttctttattgctgagttcaatagctgctttcattgagtttgtaatcacggtgagctcaatgtcagggagtatttttgccatgtaccaagcggttgtgcttgcatcgagaatgattcggtctccgctttttacatatttggccgcttcgtgagcgatggcttttttttcgatgacattcgtgatttcccgttcagaaaaatgaatttctgattccttctgctgaatactgaccgctcctccgtggctccggctcagtttatgttctttttcaagcttttcaagatcacgccgaatggtttcctctgtgactgaaaatatgtcacttaattcggaaacgcggatgcttgaacgcatatttactatttccactattttttgctgccgttctgctactagcatcggtaacgcccttcctcatatcgtagtccgtcttatattttttatcatagcatatttctaacgcgtaaaagcagcagggacgccgccgtctaccgtgatcatgcagcccgttgttttttcggctttggaagaagcgaagaatgcaatggcttcggcaatatcctccgggtaaatattgacgagcaatgctgtccgtttccggtaatgttcctccagctgatccggttcaatcccgtacgccgcggctcgttcctcccgccagcttgaaccccagattgccgatccttgaagaaccgcatcaggcaaaacagagttgaccctaatgccgaattctccaccttctgcagcaatgcatcttgctaaatgggtttcaagcgccttaaccgagctgtaggcagaggcgtttttgcccgcataaaccgaatttttcgatccgacaaataccatgcttccgcctctattttggtgtttcatctgtttaaacgcttcacgggctacaaggaaatagcctgttcctaaaacattcatattaagattccattcttttagacttgtttcgtcaaatgggcttgatgtggccagcccggcattattgacgacgatatcaatgccgccgtaagcaagcgccgctcgttcaaaagctgattgtacgtcttcctcctttgtcacatccattttgacagccattgcccgtccttctccgtatgcatcgtttatttccccggcaattttctgtgcaccttctatattcagatcagctacgatcacgtgccctccctcagctgcaaatcggcggcatgctgcactgccgattccgccggctcctccagttatcaacgctacttttcgggaaaattctgcttccggcggggccagcgtgagtttatatagttcgagcggccaatattcgacatggtaggattcattttcatgtaaagaaacaaattgccccagagcggttgctcctttcatcacggcgatggccctccgatataaagccccgcttactttagacatggcataactttttcctgtattcaccattccgattcccggaatcaatatcacccgtggggaggattcaaagatttgatccccatcctgctgatttcgtgtaaagtaagcctgatactctgatgtaaaggtctcgactcctgacttgatcagatctgcaagcttgtgcacatcttgagtttccggattccaatcaatgtacagcggaacccgttttgtgtgaacaaggtgatccgggcatgccgcaccgatttgcgaaagtgctggcgcttggacactgtttacaaattccaagacatcgtcatgatcatcataggaaaggatcattttcttttcttcacttactgctcctctgatcacaggcatgatgcctgccaagatttgttttcttttatcctccggcagcggctgataccttttgcctccgaatacctcatgctgattgatacgatcgttaacatactgctcggcttcttgaatgatggatatcgttttttgataacatgtttcagacgtctctccccaagtgactaagccgtgtttctccattaatataagctcggcgtggggattgtttgctacgccttcagcgatcattttagacaaagtaaatccaggacggacgtatggcacccatacaaaccgatttccgtaaatgtcttcagcgatttgttttccattatccgcacagcatatgctgataatcgcatctggatgggtatggtcaacatgtttgtatggcagaaaagcgtgtaatagcgtttcaattgaagggcggggatgtttgctgtctatcatacaatgagacaggtagtctaccatttcttcatctggcatttggtcccttttaatcagcgggcggatatcatctaatttcaaaccggtaaagttatgcgctttcattgttgccaaatccgaaccgcttccttttacccacatgacttctatttcacggcctctaaaatccttttccgttgttttcatagatgtattccccccgccccagttgcagacagtgcggtctgacccgatcagattggacctgtacaccaattcctctacacctttaggcagccgtgcagctcgctctgaatcccatatatgtttcgccatatttgatattcctccatccccttttatttgtatccgttttcattatatatgatttctgtttgtttttgaattgtttttgtttatttttgcttttaacaaaaaagaaagcagcagatatgccgctttcttgtttcattatgattctattttaaatttcttcgtaatgtcctgaagttcttccgccatgtttgccaacgtttccgctgaagagctgatttcttccatggacgcaagctgttcttccgccgaagctgcgatatcctgaatgcctgctgagctttctttcgccactgcagaaatatcttcaacagcacttgacacttcctgtgatccggctgacagttgttcaaccgtcgcgttcaagttttgcaattcgccggaaatttgggttgtcatctcatagatttgtttaaagctttccgctgtttgatccgtaatctgcaagccttctttcacttcatgattcacggattggaacattgaaagtgaggtgctgatttccctgacaatctcttgaattaatccttcaatttccttggcggagtctgctgattgtacagcaagttttctaacctcttccgcaactactgagaaacctcttccgtattctcccgctcttgccgcctcaatcgcagcatttaatgcaagcaggttggtttgatcagcaatgccattaatcacattcaagatgcttgtgatatcttgcgattttgtttcaaggcccttcacaaccgcttccgctttttgaacggattggtcaattgttttcatctggccgactgtatgctccaccagcttttctccgctgcccgctgcctcagaggactgaatcgatgatttcgtaatggttgaagaggcctgagccacttttgaaatcccctcgttcatttgagaaagatgatttgagcttgtttccagtttctcgctttgtgcctcgttgccatctgagaattgttcgatggcaagtgtaatatgttcagttgccttgctcgtttgggctgcgcttgccgtcagctcctcagaagatgaagcaacgttttctacagacgtttgaataacgccgattacagaacgcaatgatgcagacatttcattaaagctttcgccaagctggccaaactcgtttttcgagtgaatgtcaatgacttctgtgagatctccactgctgatttttgcagacgttgagacaagttttcttaacggcttggtgatggcacggataatatagagaatgagtatgccgccgattacaattgacacgcatagaatgataaccgcagtgttcagcaccggacttgaagcatcttgcaattcactgacaaaatatgtgcctgcgattttccagccagtcagtttatttgtcgtaaaggccattttcttttctttgccttcgaatatatattcaaatgagccttcttttttggaatatacttggtttgtccaatcgccggatccggttgtccccggcttaattgtcggatgggcgatatattttttgttgccagtcgtaataaatgcaaagccttctttaccgattttgattctttgtgatgcagtaagcacttcatccaggtttaaatcaagcgctataacccctgaaccgtcttttaattgttttgaaattgtgacaacgatatctcctgtcgcttcatcagtatacggttctgagaaaacagcttgtcctttttccgcaaccgcctgtttgtaccagtcacgtcctgtcggatcgaaacctttcggaacaccgctatccggatatttataaagcttcttatcttctgaagcagcatagattgcgcctacatcgtcgttaagtgtcgtgtactgcttaaatttctctttcagtaatgttttgtttttgcctaacaatatgtctttatcgactgtctcactataataatctattgcttttactttatcttctaatttattttgcagcgtactgtttagttcttcaacatttcccttcgcactgtttatgagctctctgtctaacgcgttccaagctgattgataactgaaatatgctaaaaccccaaccggcaaaataagcactgccagaaacgcagcgattagcggtttgctgatcgatggctgtttgatccaatgtatgaattttcccattcttgttgactcctcctttaagataaatctaatatcgtcaaactaggataaaaggtttaataaaaaaactaaaaaaaacacccaagcgtaacaagcttgggtgttaaggcttattattcgattttgaatcgtttggtcatatcgcgaagctcttccgccatagacgaaagggtctctgcagacgagctgatttcttccatggaagcaagctgctcttcggctgacgccgcgatatcttgtatatgcgctgaactttcttttgaaatcgatgcaatgtgctcagacgctcccgaaacttcttcggagctggcagaaagctgctgaaccgtcgcactcatattttgcagttcgccggcgatttggttcgtcatttcagaaatgcgtttgaagctcatttctgttttatctgtgatgtcaagtcctgtctgcacctcttgattgacagattggaacatgccgagtgatgtattgatttccttcacaatttcgatgattaatccttcaatctcttttgctgaatctgctgactgtactgccagttttcttacttcttccgctacaacggagaagccgcggccgtactcgcctgcgcgcgctgcttcaattgctgcgtttaaggcaagcaggttcgtctggtctgcgatgccattgatcacacgcaaaatgtttgtaatatctttcgatttcgtttccaatccgcgtacgacttgctccgcttctttaacggacttgtcaatgacattcatttggccgacggtttgatgaacaagcttgccgccttcacttgcaatttctgtcgattgaacagatgaatcagtgatcacttcagaagcttgagccatattcgtcaacccgtcattcatttgataaatgtgctctgctgccgtttcaatgttttcgttttgtttttcattgccgttagaaaattgttcaatcgccaatgtaatgtgctctgttgccttgctcgtttgcgcagctgatgcagtgagctcctcagaggaagcggcaacattatctacggaatcctggatggcgtgtatgagagaacgaagtgacgacgccatattgttaaagcttttgccaagctcgcccaattcatcttttgaacggatatcaatggtttccgtcaaatctccctcgctgatccgcttagaggaaccgacaagctgtttcagcggtgttgtaatcgaccgaatgatcaaagtcatgacgataatccctatgataatagctgcggccaagacaattaaagcaaggtgtaggacaggctgggctgcctcatggatttcatccaaatacatggtgccgccgatcttccatcccgtcaacttgtttgtgtcaaaggccatttttttcttatcgccatccatggtgtattgaaaatcgcctttatcagcactcaacatcttatcgagccagtcgccttttaattcagttcctgatttttcattaggatgagcgacaacttttttgtccttcgtcatgataaatgcgtagccttgtgtgccgatgttgacttttttggttgttttcagcagattttcaatggtcatgttgattgcgataacgcctgaaccatcttttgtctgctgggcgattgtcacaaccatcgtatttgtcgacgcggttttataagggtctgtgatcacgactttccctttatttgcaaccgcttttttgtaccagtcgcgttcaaccggattgtagccgcttggcatcggaagatccggatagcgggtaaagtgcccttttgtgtcacttgtataaatggattctacatccttgttaatgctgatatattgtgagaatttctctgcaatgcttgcattgctttttgcattgtatttctcttttgtcagccattcgctgaaataatcagcactgttttctttttcgccgatgctggtgttaatgatttcgtttaattgctgtacattttccaatgcgctccccatcatctgtctgtcgagtgagctgctagccgattgataggcaaagatcgccaatataacaaccggtatgatgaggatcgacagaaaggaaacaagaagcttccgtgtaattgatctttgttttatgagttggagtatttttttcatcattcatttctccttttttatgctacccttcatatcggctggaaatgggtaaatatatacagcaaaaaagaagaaatttaacaaaagtaactaatttcccataaataaatagtattttagacctattatttatctactttaaattgttttgtcagatcacggagttcttcagacattctttcaagcgtcagtgcagatgaactaatctcctccatggatgccagctgttcctcagctgaagcggcgatatcttggatgccatccgagctttccttagaaatggcagtgatatcatttgaagctgcggaaatttcttgagctcccgatgacagctcctcaaccgtcgcattcatgttttgcagctcggaagcaatttgattggtcatttgcgatatatgtttgaagctctgtttagtttcatccgtcatgacaagccctgtttcaacttctttgtttacggactgaagcacgttcagtgatgtgtgaatttcttttactatttcactgatcagcgattcaatttcttttgctgagtcagccgactgtaccgcgagctttctcacttcctcagcgacgactgaaaagccccggccatattcacccgctctggccgcttcaatggcggcatttaaagccaaaagattggtttgatccgcaatgccgttgatgacacgcaaaatattcgtgatatcctttgatttgatctccagccctttcaccacttgttccgctgattttacagaatggtcaattgtgttcatttggccggctgttttctggacgagtgtctcccctttacttgacacttctgttgaatctgcggatgtttctgtaatcactgctgcagcccgcgccagctctgccaatccgtcattcatttcattaatttgttcggttgtcgtttctattttctcgctttggctttcactgccgtttgaaaattgctcgatagccatcgtaatgtgctcagtggctctgcttgtctggtctgccgatgcagtcagctcttcagacgatgaggcaacgtgttctactgagtctttgatcccgtgaatgagcgagcgaagcgagtgtgccatatgattgaagctctcgctcagaacgccgagttcatcttttgaattgatttcaatcgtttcggttagatcgccttcactaattttttcagcggatgcgacaatgcgtctcaatggctttgtgatggatcgaatcacaaaataaatcgccgtcattccagctgcgatggcaatcgccagaacgattgaagccatgatcagaaccctgcttgcagcatcgtgaatctcgtttgcatacatcgtgccgctgattttccagcctgttgtttcgcttgttgcaaatgccatttttttctttttgcctttgtacgtatattcaaagtccccgcttttatccttgtagagcttatcaacccagtccccttttagctctgttcccgctttttctccggagtaggcgatgactttcttgttttggctcaaaataaaagcatagccttcttttccgatattgattcctttcgcggtagtgactaagtcatcaattttcatatcaatggcgacaacacctgacccatccaccgtttgacgggcgatggtgacgaccatttttcctgatgaaatcgattcataaggctcagtgacaattgttttgcctttattggccattgcttctttgtaccaatctcgttccaaagcattaaagtcacttggcatgtcagcgtacggataacgggtgaattccccgtctttgccgcttgaaaataccgcagcgacattatcattcatttggataaattgtttaaattcctgtttcagctctgttttctttttatcctgaaatttttcttctgtagcccaatcgctgaaatatgcgaggcttttttcagtcgtgctgattttatcatcaatgatgtgatctaatatctgaacattttcctttgcgctttgcgtcatctgtacatcaagtgaggcaactgctgattgataagcgctaaccgaaagggcggttatcggaacaattaagatcagcaggaaagaaataataagtctccttgcaattgatgatctgcgaatagtggtgagtgtttttttcatttccttttgaaccttctttcaataatttacaaattatatcggcggatcttcctttaaattacattgaaaatggaggaaaaaatgaaaaatagttctaaattcacctgttaaactaggactttattattgtttaccatataaaaaacagcgctttgatagcgctgtttttcggcttttactcgattttaaattgtttcgtcagatcacgaagctcttctgccatctgcgcaagagtggtcgctgaggaactgatttcttccatggaagcaagctgttcttcagctgatgcggcaatgtcctggatgcttgccgagctttctttcgacacgtctgcaatgccgctgactgctgctgaaacatgctgtgaacgatctgacagctgctcgacggtggaattcatcgtctgcagcttgcccgcgatttcgtttgtcatgctgaaaatgctctggaagctttcttttgtattgtctgtgacaacaagtccggactgtacttcctgattgacctctttaaacatgtgaagagaggtttcgatttctgcgacgatttcttggatcagcttttcgatttcttttgctgaatcggctgattggacagccagcttgcgcacttcctccgctacgacagagaagccgcgtccagactctccggcacgcgccgcttcaatggctgcatttagtgcaagcagatttgtttggtcagcgattccgttgatgactctcaaaatgcttgtgatgtcttttgattttccttctaagcctttgacaacagcttcagcctgctgaacagattgattaatcgagttcatttgtccgactgtctgctgcacaaacttctcacccgttccggcgatttccgttgattggatagatgcctttgtaatatctgacgatgtttgtgagacttgctggagtccttcattcattaagttcagctgatgagagctggattcaaccttttcgctttgctcctcgtttccgtttgagaactgctcaatcgccatcgtaatatgctcggtggctttactcgtctgcccggcagatgcggtaagctgttcggaagatgcggccacattgttcaccgagtcctgaatagcactgatcagcgagcggagagattgtcccatttcattgaagctttccccaagctccccaagctcatcctttgaatggatttcgatcgtttcggtcagatcccccctgctgatcgttttcgatgattgaacaagatgttttaacggttttgtaatcgaacgaacgataaacagaattaaaattccgcccgccacaatggaagcaatcagcacaatcattcctgtagtcagcacagactttgaggcatccttaatttcatccatatacattgtgccggctattttccaaccagtcagttcgtttgtagtataggtcatctttttatcttcgttattaagagtatactggagttcaccgctgtcattcgcatacattttggctacccagtcgcctgaaagcttttctccagccttatggttcttgtgggcgacataggttttgttttttgttgcaatgaaagcataaccttcttttccgaccttgatttgtttcatttgttctaacaatttatcaatggtaatatccatggcgacaacgccagatccgtccttcagctcctgtgcaatggtaatgaccatgcttccgtcactcgcagccacgtaaggatctgtcacgacaatttcaccgccggccttcatcgcatcctggtaccaaggccgttgtctcgggtcgtatccttccggcaatttttcttttggcgcttgtacataagtgccgttatctgcgcccccataaattctggctactccttgattaatagatacatattgtgaaaatttagctttgatctcttcttgattcgatttccctttgaatgcggaccttttaagagattcactgaaaaaggtgactgctttcgctttttctcccagatcatttgtaacagttgtattaaatgtatcgacactgtttttcgcatttcccataatttcctgatccagctttccgctggcgcttcggtaagagctaaattctaatataagaatagggataatgagaatcgcaataaatgagacgattaatttctttgaaatagacggtttcttaagccaattgataaaagtcttcatgtccacttgctccttcaggtttgatacagtatatatcggctgcttaaaaaagttttaaaataaaaaatggaagaagttctttttggctgtcttctgtcgttttaactttcattgcccaagctctttgcatatcttataaaaaacaaggggggctaaacatgattattgtatcaggacaattgctccgtccccaggatattgaaaattggcagattgatcaaaatctgaatccgctgttaaaagagatgattgagacgcctgttcagtttgattatcattcaattgctgaactgatgtttgagcttaaactgcggatgaatattgtagcagcggcaaagacgctgcacaaaagcggggcgaagtttgccacttttttaaaaacatacgggaatacaacgtattggagggtttcaccggagggcgccttggagctgaaatacagaatgccgccttcaaaagcgattcgtgacattgctgagaacggcccgttttatgcgtttgaatgcgcaaccgcaatcgttatcatttattacttggccttaatcgatactatcggagaagataaattcaatgccagctttgacagaattattttatatgactggcattatgagaaattgccgctctatacggaaacaggacaccactttttccttggagattgtttgtattttaagaatcctgaatttgatccacaaaaggcgcaatggagaggcgaaaatgtgattttactgggggaagataaatattttgcccatggtcttggaatcttaaacggaaagcaaattattgataagctgaattcttttaggaaaaaaggagccttacagtcagcctaccttctgtctcaggcgaccagactggatgttccgtctcttttccgcatcgtccgctaaaaagccccatcgcctattttccggacgatggggtttcaaatgcctttcgttttcgatagaagggggctgtgccgaaatattggttcgcagcccactccattttttcaaggtcatttcttgtcacgattggatcctggctgctccatttgataaagcggacaaaatagtagcctttgataggaaccattgtaacttttgagtgaggccagccttcaaatacaaactcaattttccctctttttttataagagtattgaagaatgttcatatttgtcacctcagtttatcaagttacgttcggcaaagctcggtacgtttacatccattgattgactatccctcatgcatgctttcctgaaaacaaagggtgaggcgcgtgtctctttccctcgctttttatttcgcatatggacgaatgccaagcgcgccttcattcgataaagcggcagccggggcgggtgtgacaagccctccggctatcggcgtttgttcagcgatcatgcttttgtcaaaaaaacagcctattatcccatcattttgatatagcatgtccgggtgcgagggccgtcaaattcgcagaaataaatgccctgccaagttccaagaatgagccggccgttttccacaatgacatgctgtgaagctccgactgtactcgacttcatgtgtgcagctgtattgccctccatatggcggtccagctcatgttcccacggatatacctcatcaaaccttctgagcatatcttttttgacgtccggatcggcattttcattaattgtaatgcccgcagtcgtatgcggacagtaaatcagcgctgcgccgctcgttatacctgtttcttgaagaaacgcttccacctcccgggtgatatcaatcatttcatctcgtttggttgttttgatttgcagtgttttcagcatttgtttctcctttcgtttgtccgctctcatcgcttaattcgttctgtgttcttttttttcctgttaaaccgctctcataaacccgataaaacaaaaaaactccagtctaaggctggagtttagcaccatagatatattcttgcttcatacggctttaagagtactgatgtcatatgcttgtgcggctctgtttcaatatttgacaagacgagtgcatctgatgacaatggcaatccagagtgcctgaacaacgccggtgttcctgtcagattggccgcaatcagtgcagtatggctctcgtttttccgaagatatgcaaagatttgctgatcttccggtaaaatgagctcgtatgtcccgttaataaaaacatcatatgtttggcgcagcttgatcaagcttttgtaaaaatggtaaacggatgttttatcgtttttttgcgcctcggcattcagccatttgtaattctcattgattccgatccacggtttggcctcagaaaatccggcgtatggacctgcattccattgcatcggcgttcttgaattgtctcttccctttttccagacaatcttcatcacatcctcgtgtgatgtgcctttcgctgtttttgtttcatacaggcgtttcattgcgacatcatcatagtcctcaatagagggaaaagccacgttcgtcatcccgagttcctgtccctgataaataaacggtgtgcctttcatgagaaaataaacagcggaaagcgcttttgcactttctttcaggtacactccgtcgtctccccacacagaaactgaacggggctggtcgtgattctccataaacaaagcattccagccgatcccttccagactgtcctgccagtcagttaaaattcgtttaaatgcaacgatatcaatactttcattgatctctacatcccacaggccgagatgctcaaattgaaaaatcatgctgaatatgccgtttttttctccagcccaatcagctgcttcttttgcagcgacgccgtttgcttcaccaactgtcataatcggatagcgggaaaatgtgttttccttcagctctgttaacaaatccataatgccgtcagcattcatatgataaggaaaggaagggacatagtccaatccctttggattcggcatgtcgggaagcccttcttttttcttaatatgcgtaatggcatccacccgaaatccgtcaattcctttatcaagccaccaattgatcatgtcataaacggcattcctcacctgttcattttcccaattcaaatcaggctgttttttatcaaaaaggtgcagataatactggcttgtcttttgatcatactcccaagccggcccgccgaaaatgctttcccaattgttgggcgcttttccgtttttgccgtctttccaaatataccagtcgcgcttttccgagtgtatggatgaacgggattctatgaaccatggatgttcgtcgcttgtgtggttcacaacgagatccataatcagcttcatccccagatcatgaatgtcaccaagcagttcatcaaaatcttccatggtgccaaactcgcttaatatgttttgataatcccggatatcatagccattatcagcattcggtgagtcatacagcgggcaaatccatatgacgtcagcgcccagctcttttatgtaagaaagcttggatctgattccttgaatatccccgattccgtcgccatttgaatctttaaaactgcgggggtaaatttggtaaacaacggtttccttccaccaagcctttttcatacagccactcctttccagtgtaccggtcttatatatcctatgtagaaaaaaggcttcacagcattgctttttaagaaatgacttgatgacacaaaaaacagccgtttgttccccggctgttttttatcaaaaatcagttttttttatttctacaaaacggatgtggtgatcttcggcgtcgaggattttaaattcacagccctccgcgtgtatcacatcccctgctttcagctccattttttgcgttagaagccagcctgcaatcgtatcaatttcttcattttcaatcgcaatgtcgagaaggtcattcacttcgtctattagcgcttttccatccatcacataatggtgctcgccctttttcaggatgtgcggtgtttcatcctgatcatactcatcgcggatttccccgacgatttcctcgataatatcctctacagtgacaagccccgccgttcccccgtattcatcgacaagaatcgccatgtgaatccgctccttctgcatgcggattaaaagctgctgaacaggaatgctttcaatgaccctgataacgggcctcatgatttgctccagctttatcggctggccgagaaaataagctttaaacatatctttgctgttgatgatccctaaaatatgatccttgtcatctttgatgacagggtagcgtgtataccgttcattaatgatgtgatgaattgcctcttcaagcgactgctccagagagataaccgcaatttctgtccgcggaatcataatctctctcgctacccggttgtcaaattcaaaaatcttatttacataacggaattcagactgattaatttctcccttttcatagctttctgaaaggatcagtcttagttcctcctcgctgatgacaacctgatgctcctttactgaatgaaagccaaacaatttcacaagaaaacttgcagagccgtttaatgctttaataaacgggtacgtgattttataaaaccagatcagcggctttgcaatccataagcttacagcttcagctttttgaatagaaaccgttttcggagcaagctcccccatcaccacatgcaaaaaagtgacgatgataaatgcaactacaaatgtgacaatgtggttaaacggttccggcatgcctgtcattgtaaataagggatgaagaaaacgttcaaatgtaggttcaccaagccatccaaggccgagggcagtaatcgtaatcccgagctggcaggctgataaatactcgtcaagattggagatgattttatgtgcggctagcgctcggctgtcaccgctttcgatgagctgattgatttttgaacctctgattttgacgatcgcaaattccgctgcaacgaaaacagccgtaatgccaatcaaaacaaaaatggcgatcaattgtaaaataagcaaaaaaagcccttaccataaatggtaaggggccacctccttaacgttaattctcatcacgaccgtttaagaaaatcatcacaaaacgaagtagttcaaacagggaaaccagggcggcggccacatacgttaaggcagcagcgctcagcactttatttaccccattttcttcattgtttcggatgaatccttctgacacaataatctgcttggcgcgtgaacttgcattgaattcgacaggcaatgtaatcagctggaaaaagactgccgctgaaaacagtatgatgccaagcccgatcaaattcaggctgccgagaagcatgcctcctaagaaaagcaaaggagctacaccggatgcaaaattcacgactgggaagattttatgtctcagcacaagcgcaccatatgactcctgatgctgcaaggcatgtccgacttcatgggaagctacggatatggcggaaattgagcggccgtaatagaccggctcagataaacgcaccacccgtcttgtcgggtcgtaatggtctgttaaagtgcctcttaccggttcgaccggcacgtcgtaaagaccgtttatatctaaaatccgtcttgccgtttctgcccctgtacgtccgcttgaggcttccacttttgaatatttttcaaagttgctctttactttaaattgtgcccaaaacgacaatcccaatgcggctattgttaaaaatataaacagcattttttcatcatcctttttccatgatcatttctctattaagattattttaatgagttttctttcccgtgtacagaaatgcgctttttcttccggcttggagcacagaatccaatcagcaaaaagaacaggcctgctgaaaacaaataaaaggcgaaaccgccggccagttctttcagaaaataaaaccaggagaagctgccggaaaagtgattatatgaattcaaatcgaaaataaacaaaatcaccgcggatgccgccagctgtgtaccgatcaaaaccacgatcgttctttgaaagatcgtcatctttttcatcctttttgttttagtttatggagaaatccggttttatatgttttgtacattttttgaaaaacatcaccggaagtgggacatactgttagaaaaaagcacgggtgtgatggaagctatgaaagtgacgagtgaggaaaaggaacagctgagcacagcaatcgaccgaatgaatgaaggactggacgcgtttatccagctgtataatgaatcggaaattgatgaaccgcttattcagcttgatgatgatacagccgagttaatgaagcaggcccgagataagtacggccaggaaaagctaaatgaaaaattaaatacaattattaaacagattttatccatctcagtatctgaagaaggagaaaaagaatgaaatcaaatcggatatttatttcatggctcaggtggccgttatttatccgaatcggggttattattttatgtctgattcttttgttcggccaaatcatttatatacttgagcctaagcagttcacttcggtattcgaaggcatttggtgggctgtcgttacggtttcgacagtcggttatggagactatgtgccgcacacgccgctgggacaggcagccggaatactgctgattttgagcggagcaagctttgtcacagcatatttcgctacgttatcagcggccgcattcagcagacagcatcgctacatcgaaggaaaagttgcttacaaaggccgggaccacatcattctgatcgggtggaatgaaaaaacaaaccggcttttgaaggaccttcagcttgccgccccttccaaaacggtcgtactaatcgatgaatccttaacagaaggcccgcttattgaaaacgttcatttcatacgcgggcacgctgccgatgatgggacactgaaacgggccaatattactgaagcggaatcagtgatgattactgccgatcagtataaaagtgaaactgatgctgatatgctgtcagtgctgactcttttatctgttaaagggcttaatccccttgcttactgcatcgtcgagattttgactgaccgttttgtcaccaatgcggagcgggcaggtgcaaaccaaatcatcggaacttcagaatttatcagccgggcgatgctgcagcattaccaagtcaagttacggccgtctaaacagcagaacggaatcaagctgacacttgatcagcatgtggagcttcttgctgttcctgacgaactaaagggagcggcttacaaaacctgtgttctctatttccttgatcacaacacaacaattataggcgtacaaaaagaggaggggccgatgatttcccctcctcttacatacaaggtgctcgaaacagatcaattccttgccatctagtgtaacagaacatcctccaattctttcacgagagaggcgccgatatccaaaaatgccggatcaatttccgcgtcccgcctttccggttcggaaaattgattaaacagtgattggaaaggccctccctcggcgtgatcgtcaacatccgcctgaaacacctgtctcagcataaacggcgttccgatccggacggccgcccctcgttcatcgagactgccctgtaccgcattgacgggaattcttaaaaataaatagccgtctctatcatcaattttataatcaaagtagccatgatcgtattcccagccgccgtttatcacataaccgagcggcttcatcacttgttccagttcttgaagcagaaaagactgcccatctatcgcggaaggtattggtatcatcagaatgccccttttttcacttatcctgtcccgccgaacaagacttcattcagaggcgcctacatggaaatcgttgtttctttcgcgcggccaacagaaaagaaagcgcattcaattaagaagtaaacagtcattgccgctgcaagccatacagctgaatcccaagacacataaacaaccgttgcatagagtcctaatttagtgaaaagagtatgggttcgttttaaatgcaaaatccgatgtaccgcatcggtaaaaagggcaagcggcaaaccaatgagaagaaaggcgtggatgaaaaaatgtgaaagcgtgccgccaaagcttgaagaaaactctgtatacacggcatcaaaggagataaggaaacttaaaatagctgcagaaaaaccggcaatgatgagatgtttaaccaattgtttcatgaacatcagcacctttctgattttataaaaagccgaccggcaaatgccagtcagctttctcacattaatcttccagacgtttttcaagctctgcttttttctcttcaaagccaggtttgccgagtaacgcaaacatattgactttatacgcttctacaccaggctggtcaaacggattgacgccaaggaggtaaccgctcatcgcgcaggctttttcgaagaaatatacaaggtatccaaaagtatatgcattcagctcaggaatgttaacgattaagttcggaacatttccgtctgtatgggcaagcattgtgccttggaatgctttcttgttaacgaaatcaacagttttaccggctaaatagttcaagccgtcaagatcgttatccgcttcctcaattgtcagttcatgtttaggtttctctacgttcaggaccgtttcgaataaatctctgcggccttcttgtacatactggcctaaagaatgaaggtctgttgaatagttcgctgaagaaggataaatgcccttctcatctttcccttcgctttctccgaacagctgcttccaccattccgcaaagtattgaagcgccggttcgtagttgatgagcatttcaattgttttgcccttattataaaggacattgcgaacaaccgcatattggtatgctgggttatcttccagttcagatgttgcaaaatctttgctcgcatccagggcgcctttcatcatgtcatcaatgttgacgccgctgacagcaatcggcaagaggcctacagctgttaaaactgaataacggccgccgacatcgtcaggaataacaaatgattcgaaaccttcttcgttagaaagcgtttttaatgcgccgcgctctttatcagttgttgcataaatccgcgctttcgcttcttctttaccgtatttctcttcaagaagcttgcggaaaatacggaaagcgattgcaggttcagttgttgtacctgatttagaaatcacattaatagagaagtcaacatcttcaagaagatccatgacgtctctcatataagatgaactgatgttgttcccgataaaaatgacttgcggattgccgcgttttgcttttggcaaagtgttataaaacgcgtgattcagcgcttcaatcgctgcccgcgctccaagataagaaccgccgatgccgacaacaagcaagacatcagagtcagatttgattttttccgcgctttttttgatgcgcgcgaattcttctttatcataatgttcagggaggtccacccagcctagaaaatcgctgcccgcgcctgttttttcatggatattatggtgtgctgtttttacaaagtcccgcaggtatgtaagttcatgttcgttgaagaaagtcaacgcttttgagtagtcaaagcgtacatgcgtcattgcttgtccctccataacggtataatgttttcatctttcactttatatgaacttatctgtgaaatcaagtcaagaagaaagggcggaatgactggattccgccctttgggtttatagagacgcgcgaaggatggcaagcacgtcatctttgttcagtttttggaagttgccgaagcccccgtgttccatttccttggctgcgatatcagcaatcagttcaagcttttcttctccaatattgtaatcagcaagacgagaaggtgcaccgaggcttgtccagaacgcagacagtttatcgattccttcaagcgcaatttctttatctgttttgccttcagtatcaatgtcaaacatgttgagcattaggtttttaaaacggcctacatttgtatcaagcgtgtatctcatccagtttgggaacagtatcgccaaaccgcccgcgtgcggaatatcatatacagctgaaacagcgtgttccattgtatgagaagcccagtcaccaaagtagcccatttggagcgtgccgtttaaagcaatagtaccagcgtacaaaatcgtttcacgaagtttgtagttttccagatcttcaagaagcttaggagctgtttcgatgaccgtctgcaaaacagcaaagcacattctatcctgaagcggcgtgttttcaacattatggaaatattgttcgaatacgtggctcatcatgtcaaccatgccgtatactgtttgattttctggaacggtgaacgtattttcagggtctaaaatagagaaacgcggatgagtgacattgctgccccatacaaatttctcgtttgtttcccagtttgtaatcacggaatctgggttcatttcagaccctgttgcagcaagagttaaaacagtgccaaacggcagcgcatcctccgctgttacttttttgctgaaaatatcccaagcgtcgccatcgtatttgacgccagctgcgattgcctttgtacagtcaatcacactgcctccgccgacagcaagcagaaaatcaatgtcatgctctctgcaaagtcctatgcctttttccactgttgcaagacgcgggttcggctctacacctgacagctcatgaacaacagcgccctcttcttttaaaatgcctgtgacttgatcataaaggccgttgcgtttaatgctgccgcccccgtaaacaagcagtacattcttgccgtattgtttgaattcttttcttaattgatcaagctgaccttttccaaaaatcagctttgtcggattataataagtgaaattttccatagtaaaacctccaaatgatgctggtaaaaaacagattttccattgtaacataagttgacaaaaagaaaaagggaagcagccaaacggctatttcccctttttttatagagatgctttcaaaattgaaagcacatcttctttgttgagtgatttaaattggccgaatgtaccgttagccattgccttgtcagcaattgtgtcaagctgctcatcattaatatcataatcagcaagacggttcggagcgccaaggcttgtccagaatgcggacagcttatcgataccttcaagggcaatttcttcatccgttttacctgcttcttcaacatcaaacacgcgaactgcaagctgtttcatgcgggcagggttttcagacaatgtgtgtctcatccagttcgggaacaaaattgccagtccgccggcatgcggaatatcataaacggctgatactgcatgttcaatattatgagtagcccaatcccctcttgcccccatagaaagcatgccgtttaatgcgattgttcctgtgtacaggatcgtctcacgcaattcgtaattttcgagatcattgatcagcttaggcgctgtttcaatgactgtacgcagaagtgattcacacatgcggtcctgatacggcgtgtttgatacatgatggaagtattgttcgaatacgtggctcatcatgtcaaccatcccgtagatcgtgtggtttttaggtactgtgaatgtattcaccggatcaagaatcgaaaatttagggaatacgagcgggctgccccagccgtatttttcttttgtttcccagtttgtaataacagatcctgagttcatttctgaaccagtcgcagcgagagtcaataccgttccgaatggcaaagcatcttttggctgatgctttttcgtaacgatatcccacgcatcaccatcatactttgctcctgcggcaatcgcttttgtacagtcgattacgcttccgcctccgacagccagcaagaaatcaatgttttgttctttacagatggcaacacctttattaacagtcgacacacgaggattcggttccacacctgctaattcatgcacggtcgctccggctttattcagctgttcaatcacttgatcatacaggccgctgcgtttaatgctgccgcctccgtacacaagcaatacgttttttccgtaaggtttgagttcctccggaagtctttccacttcgccgcgcccgaaaattaatttggtcggattccagtatgtaaagttttgcatgacatctcctccttagattttttattatgcagaatgtcctcaccacatgtaaagcaatcagctctcaccgatcagcataccagatggttttattttgcaagatgctgggaaagaagctgatataagcgagggcaggccagcctcatatggagaatgcatgtatagattctccaatatgtcacaatctataactgttttaataattcatggaggaggttgcaaaacatgagtaccattcaaagaatttgtcttgtattaaccatcattggcgccattaactggggactgatcggatttttccaatttgacttagtagcggctatcttcggcggccaagggtcagctctttcccgaatcatttacggacttgtcggaatcgccggcttaatcaacctcggtctgctatttaagccaaacgaggaaagatcacgtgaagaagcagcaaatcctgaaatgcgataggatatcaatcacgctgaaataggattttgtattaaatcaaaagcaccgaacattcctgtccggtgctttttttcatgcttattttttgataaggtctttgcggttggacatttcgatccactcttcaagcttatcttttaatgtgttgaaaccttgtggtgtagaagcttcttcgcttacttgagcagctttaggttttcttggtttgctttcttttttctcaggcgcagcttgtgtcgcacgaattgaaaggctgattttgcctttttcttcatcaacagcaagtacttttacttgtacttcgtcgccaactgaaaggtgctcgttgatatcttttacgaaaccgtgagtcacttcagaaatgtgtactaaaccttgagtttcttcatctaatgcaacaaacgcaccatacgcttgtaatcctgtaactttaccagtgtaaacactgcccacttcaaattttgctgccattcataacaactcctaagttaaattaaatatctgtttatacgcaatttaaaattatatcacacatgtcttatttccgcaaagaaaactttttcataaaaaaatcaggtttatgcacagcaaaaagggggtaaactgaaaataccaaaggctttctagtattcccccttttattggatgcgaacaaaaggttcgtatctttttttatattgttttgtgcaggaagcgtttcattctgactaacgcttcttgaagctgttcaatcgaggttgcgtatgaacaacggatatatccctcaccgctcggaccaaacacacttccaggaacaacggccactttttcttgcgtcagaagctcctcggcaaactgttctgaactcatccccgtgcttttaattgatggaaaagcatagaaagcgccgcccggatgatgacagctgagaccgatttcattgagcgattctacaaacagattccgtcttcttcgatagctttttttcattttttctacgtcttccatgccgttcttcaggccttcaagggcggcaaactgcgccattgcgggcgcacacatcatcgcatattgatgaattttaagcatggcatcccgaagcaaggatggtgccgcggcaaaaccgagcctccagcccgtcattgcaaatgcttttgaaaagcctgagatgactaccgtccgttccttcattcccggtaatgccgctatacttgtaaattcctcatcatatgtcagctccgcgtagatctcgtcggctaagacgatgacatcatgttttttggcaaactcagcaatctcattcagctcttccttcgaataaaccgaacctgtcggattcgatggtgagcagatgagaatggcctttgttttttcagtgactgccgcttcaaaatcagcagccgttgctttaaatcctttgtctgccgttgtatgaacgtgaaccgggataccgcctgccaaagaaacaagcgcatcatacgccacaaaacacggctcaggaatgatgacttcctcacctggattcacaatggcgcggatcgcaatatccaaagcctgacttgcccccactgtcacaatcagctcattatctggcgagtagctaagatcaaacctgttgctcaaataacggctgatttcctcccgcaatgagtataaacccgcattggccgtgtatgacgtatatccttgttcaagagagagaatgcttgcttcgcggacattccacgcggtaacaaaatcaggctcgccgacgcctaaagaaatgacgccttccatcgttgccgccaaatcaaagaatttgcggatgccggatggttttatttgttgtacatagtctgataaatacgaagtcatttacggtgacaccacgattcttttgtcgtcgtctcctgtttcaaacactttgccgtcatgcttgtattttttcaggataaaatgggttgtcgtagatacaactgaatcaagcgttgagagtttatccgaaacaaaacgcgctacgtcagacatcgaattgccgcgaatcacgacagacaaatcgtatacgcctgacatcaggtaaactgattcaacctcttggaatcggtaaatccgttccgccacttcatcaaaaccgacgccccgcttcggcgttactttgacgtcgatcatggccgtaacgccctcatgtccgtctacttttcgccaatcaatcatagcggaataatcgataataaccttttctttttccagtttgtcaataattgtttttacttcatttacagggatgcccgccatctttgcgattgtttctaaatcggcgcggctgttttcgtctaaaatttctaatatttctgtttctttttctgtcagtttcatttgattcacacctttgcaatgtcaagaaatctcatgacattatatcacgttttttgacgaatgctaagaaaaaacgaggagaaacttccgctagaatttacaatttcagggcataatacaaccatcaaaaaaagggagtgacacagaatggaggcggtttcaccaataaggcggtttacggtcgatggagtcaatgtatactacgaacattatcaaaatcccggcaggcaaacgctggtttgcgtacacggttttttatcatctgcattcagcttcagaaaagtaattcctctccttcgggacaagtacgacatcatcgcgcttgatttgcctcctttcggccaatctgaaaaatcaagaacgtttatctatacctatcaaaaccttgctaagcttgtcattgggattttggagcacttgcaagtgaaacaggctgtgcttgtcgggcattctatgggcgggcagatatcgctgtctgctgctctccaaaaacctgagcttttttcaaaggttgtgctgctttgcagttcagggtatttaaaacgttcacacccgacgatcattttcgggacccatatcccgtattttcatctttatatcaaacgctggctctcgaaagaaggcgtgatgaaaaatttattaaatgtggtgcatgacaaatcgctgattgatgaggagatgattgacggctatggcagaccgtttcaggacgagcagattttcaaagccatgacaaggtttatccgccacagagaaggagatttagaacccgagcaattgaagaaaatgaacaagcctgctctattgatttggggcgaggaggatcgaattgtcccaatggagatcggtaaacggctgcacgcagatttgcctaattccgtgctgtactcacttggccagaccggacatctggtgcctgaagaacggcctgaacttgtttctgaacacattgctgattttatcaattaaaaaaaccggtgctgaaccggtttttttaaggcgtgcaggagctgctgtttttaatgaataaaagctggccagccacttcccggcagctgtcgatcggcagcgtttgttcaaaagaagtttcaaatatttgctgaatgcttttcgccagcacgtcaggatcgtcttcatcatagactgcctgcacgacatcaacagcctccgtttcgtaaaactcttctccatatttaaacgggtcccatttggcaatgatcttaatcatttccctgaccgcttgactttcttccatattcatcaccgcttataataaaatttgcagttctatcttatcatagtgaagcttagaagaataaacatacatgagggggtaacagaatgaactttgataaacgagaagaacgccttggcacccaatcggtcaaatgggacaaaacaggcgaattatttggcgtgacagacgcactcccgatgtgggtggcggatatggattttcgcgcgccagaagcgataactgaagcgttaaaagagcgtcttgaccacggtatttttggttatacaactccagatcaaaaaacgagggatgctgtgtgcggatggatgcaaaacaggcacggctggaaggtgaatccggaaagcatcacattcagccccggcgttgtaacggctttgagcatggcggtacaagcttttacggagccgggcgatcaagtagttgttcagcctccagtttatacgcctttttaccatatggtggagaaaaacggccggcacattttacataatccgctgctagaaaaagacggcgcatatgcaatggattttgaagatttggagacgaagcttagtgacccaagtgttacattgtttattttatgcaatcctcataacccttctgggcgttcatggggccgggaagacttactgaagctaggcgaattgtgccttgagcatggcgtcacagttgtatcggatgaaatccattctgatttaatgctgtacggacacatacacacgccgttcgcttcgctctctgacgatttcgctgatatttctgtgacatgtgctgctccaagcaaaacatttaatatcgccggattgcaggcttcagcaatcattattccggatcgcctgaagcgcgccaagttttccgcaagccttcagcgcaatggtttaggcggactgaacgcgtttgccgtcactgcaatcgaagccgcgtattcaaaagggggaccgtggcttgatggattgatctcttacattgagagaaacatgaacgaagcggaagcctttttgagcaccgagctgccaaaggtcaaaatgatgaagccggatgcatcatacttgatttggctcgacttcagcgcttacggcttgtccgatgcagagcttcagcaaagaatgctaaaaaaaggaaaagttattttagagcccgggacgaaatacgggcctggcggagaaggatttatgcgcctgaacgcaggatgctctcttgcaaccctgcaggacggcctgcgccgcatcaaagccgcattatcgtaaatatagctgttaaacgcctttacgtcttcatttgtaaaggcgttcttaataaaggaattttatattttacttctaatatttagtgttataatagattcatattttatacgaaaggatttcacacgaatggaaattctaaaagactatcttctgcacatctgctttattttgtttcctattcttctttaccaagtgttttggcttggaaaacctgcgattcttgtgccaaaaataaacagcggtttggtcacgctcttcgcctgcggcgcctccgttttatgcattattttcccgattcatgaaatggactacatacaatacggccttcagatgattcccgttatcatttgtttattttacattagtaccgcttccggacttacagtcgccgcatctgtcctatgttttgaactgcttttttacgaaccttccgcaatgtttgttttcactttgctgccttttcttatcattatcccaatcttatttcagaaaaaatggccattcatgtccaaagcgaaaaaactgctgctgtctttattgatcagctgcgtggagattttcctatttttcgcctcaagctggattctttccgccttgaatattttaaattttcaaaaatcaggaattttcgtttacgaggcggcagtctcagggcttttccgctccagtgttcttctattaagcatctatattatcgaaagcatcgccgaaaatatcgccctgcgctcacagcttatccattctgaaaaaatgacgattgtgagtgaactggcagcgagcgtcgctcatgaggtcaggaatccgctgacagttgtccgcgggtttgtccagctgctttttaatgatgaaaccttacaaaacaagtcgagtgcagattacaaaaagcttgtactgtcagagcttgaccgggcgcaaggcattattacaaactatctcgatatggccaaacagcaattatacgaaaaagaggtttttgacctatctgcccttatcaaagagacaagctcccttatggtgtcgtacgccaattacaagtcagtaaccgtcgaggctgaaacagaaccggaccttttgatatacggagacgcaacaaagctgaagcaggctgtcatcaacctgatgaaaaacagtattgaagcggttcctcacggtaaggggatgatccacatatcagccaaaagaaacggccatacgatcatgatcaacatcacagacaatggggtcgggatgacagaccatcaaatgcaaaaactcggcgaaccttattattccttaaaaacgaacggaacgggactcggcctcaccgtaaccttttccattattgaacatcatcacgggaccatttcatttaacagcagcttccaaaaaggcactacggtgaccattaagcttcccgctgatcttcctcactagcaaatcgattggaactttaatagaataaatgcgaggtgatgacagatgagcacgtttgagacaggctctatcgttaaaggattttacaaaacaggtgtatacataggagaaatcacggcttgcaggccgcagcattatttagtgaaagtgaaagcggttcttacccatcccgctcaaggagaccttcatcatccaaaacaggcggatgtgccattttttcatgagagaaaagcgctcgcacatggtgaacagaccaatatcccccaccatatggtgaagccttatgacggtgaagtgccggattataccgaatctctgcgggaggcgacagcacagctgagagccaaattggatgaggatggttcggagtgggcaaaacgctcccttcataatctggacattttagaaaaagaatattttaacctgccataacccagtctgacaaaagattgggttttttacgtcgcgcgcttcaacagttcggttaaatcgattctctcgccgattgtgggcggttttggcttttcgagatactgcttatcctgctcaacaagcttaaaaagtttatatgctgtaagagcatcatcaagcgctttatgatgggtgccggttccggaatctccatactcttcggcagctttccataaacccgtcaatgtccggtctccaaaaaagtttttgtattcaagcgataaatctctcatttctcccttaaacgggaaagggatatggttaaacatacagttttgcttcagcactttcatatccatgtttccccacgtaataattgtgctgtttttctcaggatccagctcgtttagtttacggatgaaatcctcgaatctcattccttcgtctacctgtttttgggttatttttaaaaatgatttgcagcgtttcgtaagcttcgggaactttttcggtctaacatagctagaaaacgtctcaaccacttcatcatcaatcgactttacaattccggcttcaatgatttccgggaagaagttttgaggactgtactttccgtcaggcattgtaaattcgaaatcaataatgagtaagctgtttgtcgtcacctttttacacctgcctttcctccgatcagaaaatgctatctttatagtatatcaattccccttctcgacatttcttcattttctaaaaataatgaattttcccagccgcttcgtttcttttaaattgtgaatcgtttctttataattagtaaggaacccgaaataataagaaggtgatgttatttctatccgtaagaaaaactttgtcattgtgtggctggcgaacttttttgtctccgctagcacaacgatgatcgttccttttctctccttatacattgagacgctcagctctttttcaaacggctttgtgcaaaggtggagcggctatgtgttcggcattacatttctcatggcgttcttggtatccccgttttggggacggttcggagacaaacgcggatataagaaaatccttatggcaaccggaacgggcattgccctcagcattttcttcatgggctttgttacatcggtgtaccaattgttttttctgcgtatggcaatgggtcttgtaaccggattcatcccgacatctcttgcgatgatttcggcacagactccgaagagctcagccggcaaaacactcggcacgctgcaaatggggcaagtgtccggaagcttgttcggcccgcttttgggaggcatgcttgctgatcgtttcggctttacgtataccttttttatcacatcctttgtgattttctcgtctgttcttctcgtgttatttggtgtcaaagaaaagcctcttgcagagaaaacagccaaacgtacgtcttactcgaggaaagaagtgctatcctatatttttcaccagccggcgctgtgggtcatgatgctgttaaccatgctgattcaaacaggcaatttcagtatccagcccctgctcgctttatatgtaaatgagctgcatggacctgtcaatcttgcctttttctccggcatggcattttcagcaacggggctcggaagtttgctgctggctagaaaatggggtgatctgggcgaccgctacggccaccgccgcattttaatcggacttttgctcgccgcctctttcttttttattccgcaggcgctcgcgtcctcactcagcgtgctccttgttttcagatttttattcgggatggcgatgggcggtttgctgccatgcattacggcagcgatccgcgttcaggctcccggcagcattcaaggtgaagttctcggctacaatgtcagctttcgctttttaggaaacgtgctcgggcctctgctcggcggaatcatatcgagccattttaccatttcggccaccttttacgtcacggcgtttctctttttcgccggcgcctgcatgctttggatcatgcagaaacttcggaaagattcttatgccaaagcaagctgattccgagaaaaaactgaggaatcttctaaatttaaccttctcgtaatctcaaaagaatggtacgatatggctagaatttaggagaaaagagagtgaccatgttacgaaaaataatcggatggattttgctcctttgcataatcccattgtttgcatttacagttatcgcttccggaaaagaagtaaaacaaatgaagtccctggatcaggtgcttgataaaaatattaatctgaaagatatcagccttgttcagaacagctacatgtatgacagggacggctcccttgtctcggaaatcgtcagcgaccacgaaaaccgtgtgctcgttccatttaacaagattcccgaggaagtcaaacagattttcttaacatctgaggaccgccatttttacgagcataaaggctttgactttatgggaatggtgcgggctactgcttctaacgtaaaagacaagaaaattgaccagggtgccagcaccatcacacagcagctttcaagaaacttatatttgagccacgaacgctccttcagccgcaagctgacagagctcgcgtattcctatcagctggagaaaaaatatacgaaaaatgaaattcttgaagcttacttaaataccatttattttaacaatggtgtttatggcgtcggttcagcagctcaattctatttcagcaaaccgctgaaatctctcacagtgggagaaatggcttttatctgtgctatacctaataaccctacattatatgatcctctcaagcattttgactacacgaaaagccgtcaagaacgtttgcttaaagggctaaaagatgccggggtcattacggacaaagagctgaaaaaagccgtaaaacaaaaaatcaaactggatgttgaaaaaagagaagacaaatatcctgactacgtttcctacgtcaatgatgaattcactcagctggtgtctgaatcagaaggctttgataaacgccttcaaaaagcatcaggaaaacaaaaagaaaagatcgagaacgagctgtccgcaagagtcagcactctgatgaaagacggcgtgaaaatttatactgcacttgatccgtacatgcaaaatcaagttgtggcacaaatgaattccaagctcccgtatgcggacgtacagggcggagcggctgtgattaatcaccagacgcatcaaatcatcgctctatccggcgggaaaaactatcaaaaatatgactttaaccgcgcctaccaggcgtacaggcagccgggttcatccattaagccgcttcttgattacggcccttatattgaacagaccggcgcgacaacaagcagcaccattgatgccagcaagttttgcagcaaagactactgtccgcaaaactacaataaccgcacttacggcacagtgacgcttgatacggcgtttaaaaattcatataataccccggctattagaatgctcgaccgcgtcggcatccaaaaggcattcagttatattgagccgtatcattttgccaaacttgtcgacagtgactatcttcttccggcggcgcttggcggatttacaaacggcatgacgcctcttgagatgacaaaggcttatacgacattcggaaacagcggaagctatacgccgagccatgcgattacaaaggtgacagaccttaaaggaaaaacactttataaatggaatgataaagcgactcaaatattcagcgtccgcacgaacatgcagctgaaaaaactgatgtcttccgttgtgaaaagcggaacagggaaaaaagcatatttcaatgcgccttacatcggcggtaaaaccggaacatcaaatgattatcacgatatgtggtttgtcggcctgactgatacgtatacaatgggtgtctgggtcggaaaggatacaccgaccagcgttgaatatcttcacagcatcagccctcagctttccatctggaaaggaacgctgcaagcggcttattaaaggatcggaggggatatggagtgacttcagaacaaattccaaatcgcgttttgctgtttgacggtgtctgcaatttatgcaatggagccgtgcagtttatcattaaacgtgatccggacggattgatttctttcacatcgctgcagtcggaaacaggacagagcctgctgaaaaaaagcgggcttccgactgatcggtttgacagctttgtctttattgaagacggccaagtgtacacaaagtcaactgcagccattaaggttttcaggcatctgcgaggcccatggcggctcttcgtcctgtttttcgcagtgccgaagcctgtcagagatatggtctattcttttattgccaacaaccgctataagtggtttggcaaaaaaaatgaatgtatgctcccctccccttctattaaaaaaagatttttaccgtaaataaaaaatggctaggaagctagccaacacagattgttgacaaaatcctaaaacggcttcgttttaggattttgtcatcttttcagcgtgattgaaaacctttgaagtcgacgaagagcgagcattggatgtgaaacggcaggaacctgagaatctagccgccgttttattgcgtacagagcacgaagcgcaaatctgaccactaaacgctgaaatggctagcttacacaggtaagctagccattatgctattataaagcttgataaatatgaacagaataccgataacaaaggtaaaccaaaacagcagttccaatagaatgaatccaactaatgacatgagagaaagcgtcgaataaatccggtacacggtaaacacaaagtaagcgagcgtgacgaccgcaaaccagatcacaatccaaatgacattttgcaagagcacaaaggataaaatcccgccgcccaaataaatcatggaacccattctgagttttttcaggttgttcccttccggatcattagcaaaaaacagcaatgacagctcggtcacggtatttgcaattaatttcagagcggacagaaccataaaatataaaagtgcaaaggcagcaaataacgcaagcctgattcctttctctgaaaaataatcgagcattccatcatacattccaaatgaagacagcatcttcaacgcataaagtgaagttgagatggataaggacgaactaaaaagcaggatcgcaatcagcggaaaatatcctgtcaaataagtatttttcatataaaaaagtccctttctataatctacctcatttattatggaggacttaaaacacattgacaagataaattattccattttttctcctttttacgaattacggtcccaaatcttcacaaagcagcattttgagagtaaagtagtacgcaggaatcataaaacgtaaggaagttttatatgaaaaaaacattaaaactgcaaaccagactcaccatatttgtttgtatcgttgtattaatcgcattgctcattacgttttttacagtcggtgcccaaaccaccaaacgaattagagatcaggaaaaggccactgcgctgcagactgctgaaatggtagctgaggcgccgatgacagccgctgctttagaaagcggaaaaaaacaaaaggaactgcagagctacacaaagcgggttcagaaaattaccggcacggaatttgttgtcgtcatggatatgaacggtatccgcaaaacccatcctgacccgagcaaaatcggaaaaaaattcagaggcggtgatgagtccgaggtattaaaagggcatgtccatatcagcacagcctctggcacgctcgggaaatcgcagagagcgttcgtccctgtctacgcggagaatgggaaacaagtcggtgcagtcgcggtcggcatcaccgtaaatgaaattgatgaagtgatcagccatagcttacggccgctttactttattatttgcgtcagcatcttcgtcggtgtgatcggagccgttatcgtcgcccgtacagtgaaaaatatcatgtacggacttgaaccttatgaaattgcgactctgcttgaagaacggagcgcgatgctggaatcgacgaaggaaggaatactcgctgtcgatgaacatggcaaaattaaacttgccaacgcggaagcaaaacgcctattcgtcaaaatgggcatcaacacaaatcccattgatcaggatgtagatgacatcttgccgaaaagccgcttgaaaaaggtcattgagacaaaaaaacctcttcaagacagagacgtccgcattaacgggctggagcttgtgtttaatgaagttcctatccagctgaaaggacaaactgtcggagcgattgcaacattccgcgacaagaccgaggtaaaacatttagctgaacagctttccggtgttaaaatgtatgcaaacgcactgagagcgcagtctcatgaatttatgaacaaactgcatgttatattaggtctcgtccagctgaaagagtatgatgatcttggagattatattaaagatatagccatacagcaaaaatcagaaacaagtgaaattataaatgatgtcaaaagctccgtactggccggttttctgctcggaaagcaaagctttatacgtgagcagggcgcaaatcttgatattgaatgcaacggtgtcatcccgaacgcggcagacccttctgtcatccatgaacttattacaatcatcggaaatctcatcaacaatggcttagacgccgttgccgatatgccgaaaaaacaaatcaccatgtccatgcgcttccataacagcatacttgatattgaaattaccgatactggagcaggcatgtctgaagaagaccaagccaaagtatttgaacaaggctattcaacaaagggcaaaaaccggggattcggcctttatttcacacagcaaagcatcgaaaatttaaaaggccaaatgatcctcacaagcgaaaagaatgaaggaacgacattcagtattcgcatcccgtacgaaccgaaggaggaaaatcatgattaatgtactaatagttgaagatgaccccatggtgggtgaattaaataaacgatacttaagccaaatagatggctttcagctgaaaggcatcgcttcttcctttcaaagcgctctgcatattttaggcgagcaccatatcgacctcattttgcttgatatttatatgccgggaaaaaacgggctggaactgctgacggaattgagagcccaaaatgaagcggttgacgtgattgtcatctcagcggccagcgagcttgacgtaatcaagaaaacacttcggtacggagctgtcgattatttaatcaaaccgtttgaatttgaacgtttccaaacggctctgtctgattacagacgaaaacaaaaggtgtattcaacccatcgcaacatgagccaaaaagaactggacgccgagctttttcaaaagaaagaagcaacagaaaaagtgcagcttcctaaaggcctgacaaaaagcacgctgaagctgatctggtccagtatccagtcatttgaaaatgaatcttttacgacagaagacttggcaaagcacacagaaatctctcaagtatccatacgaaaatacttaaagtttcttgaagatatacaagttctgaatgtagaaatggcgtacggaacgatcggaagacctgtgtttcagtacaacgtaaacaacagtaaccttaacggaataaagcaatatctataagaaaacgcactgcttgctttgagcagtgcgtttttctgtcatatctcttgccaagatgcttgattctattgttgataagttatacaagaataacaaagggctttcacatttttaagcaaataattctaaaaatagatactttttaaaaaattatgcgaaattctatttatttcttattagttaaatgataaattatgattggttagttgatcccgaaaaactaagtcataagtcttacttcagaaaacgatgtcacggttttccgcccggaacgccttccgcatccttctcttccccgcctttcgaaggaaatactcacaccacgcttattcagggaagaatagaactgtctcagcgcattccatttgttattatcagaaaattttatcgattctaagaaattgttcaggacagcccatcacatgactggccggatcagctttgaaccaaatttttctggggggttatatcttgaataaacgaaaaatcggattggcgatgtcacttgtgatcgcagcaggcaccatattaggagcatgcggaaacagcgaaaaaagcagcggctcaggcgaaggcaaaaacaaattcagtgtggcgatggttactgacgtaggcggagtggatgacaaatccttcaaccaatcagcctgggaaggcatccaagcctttgggaaagagaatgggctgaaaaaaggcaaaaacggttacgactatcttcaatccaaatcagatgcagactatacaacgaacttaaataaattggcgcgtgagaattttgacttaatttacggcgtcggctacttaatggaggattcaatcagcgaaattgctgaccagcgcaaaaatacaaactttgcgattatagatgctgttgtcgataaagacaacgtcgcaagtattacgtttaaagagcaggaaggctcatttctcgtcggagtggccgcagccctatcaagcaaatcaggaaaaatcggctttgtaggcggcatggaatcagagttaatcaaaaaattcgaggtcggcttccgtgccggcgtacaagcagttaaccctaaagccgttgtagaagtgaaatacgcaggggggttcgataaagccgatgtcggcaaagcaaccgccgaaagcatgtataaatcaggcgtagatgttatttatcactctgcgggcgccactggcacaggcgtctttactgaagcgaaaaacctgaaaaaagaagatccaaaacgcgatgtctgggtcatcggtgtcgataaagaccaatacgcagaaggccaggtagaaggaacagatgataacgtcaccctcacttccatggtgaaaaaagtagatacagtcgttgaagatgtaacgaaaaaagcgagtgacggaaagttcccgggcggcgaaacacttacctacgggcttgatcaagacggagtcggcatttctccatctaaacaaaatctatcggatgatgtgatcaaagcggtcgataaatggaagaaaaaaatcatcgacggattggaaatcccggcaactgagaaagagctgaaaaccttcaaagctgaataagaatcgcagggataaggaggtcgagcccttatcccttgtttttcttttattttgaaataaaggagcggtcaatcaatggaatatgtcattgaaatgctcaatatccgcaaggcgtttccaggtatcgtcgccaatgacaatatcaatcttcaagtcaaaaaaggcgaaatacacgcgttgctcggtgaaaacggagcggggaaatcaacgttgatgaatgtccttttcgggctgtatcagccggagcggggtgaaattcgggtgcgcggcgagaaggtgcacatcaacagcccgaacaaagcgaatgaacttggaattggaatggtgcaccagcactttatgcttgttgacacctttacagttgctgaaaatattattctcgggaaggagccaaagaagtttggcagaattgaccggaagcgtgctggccaagaggtgcaggacatttccgatcgatacggcctgcagatccatcctgaagcaaaagcagctgacatatcagtcggtatgcagcagcgcgcagaaatattaaaaaccctctaccgcggtgccgacattctgatttttgatgaaccgacggctgttttgacgcctcatgaaattaaggaactgatgcaaattatgaagaacctggtcaaagaagggaagtccatcatcttaatcacccataagctgaaagagattatggagatttgtgaccgcgttacggttatccgtaaaggaaaaggcatcaaaacccttgatgtccgtgatacaaaccaagacgaactcgccagtctaatggtcggccgcgaggtatcgttcaaaactgaaaagagagctgctcagccgggagcggaagtgcttgcgattgacggcataactgtaaaggatacccgcggaatagagacagtcagagatttgtctctttctgtcaaagcgggagaaatagtcggcatagcaggcgtcgacggaaacgggcaatcagagctgatcgaagcggtgacaggactccgcaaaacagattcaggaacaatcaccttaaacggaaaacagatccaaaacctgacgccaagaaaaatcactgaatccgggatcgggcatattcctcaggatcgccataaacacggtctcgtccttgattttccaatcggagagaatatcctgctgcaaagctattacaaaaagccgtattcagcattgggcgttttacataaaggcgaaatgtacaaaaaagcacgcagcctgatcagcgagtacgacgtcagaacgccggatgaatatacacacgctcgggcattgtcaggcggaaaccagcaaaaagcgattatcgggcgggaagtagaccgaaatcctgatttattaattgccgcccagccgactcgcggccttgatgtcggagcgattgaatttgtccataaaaagctcattgagcagcgtgatgccgggaaagccgttcttctcctctcgtttgagcttgaagaaattatgaatctcagtgacagaatcgccgttatttttgaaggacgcattatcgccagcgttaatccgcaggaaaccactgaacaggagcttggtctcttgatggcaggaagcacgcaaaaggaagcggggaaagcaaatggttaaacgactctctcatttactcgtgccgctcatcgcaatcatccttggtcttgcggccggcgcgttgattatgcttgtgagcggctacagtgtggctagcggatattcggctttgtggaatgggatattcggagaaatctattatgtcggagaaacaatccggcaaattacgccttatattttatccggattggctgtcgcctttgcattccgaaccggactctttaatatcggcgtcgagggacagctgctcgtcggctggacagcagcggtttgggtcggtacggcgtttgacggaccggcatatattcacttgccgctcgcattgattacagcggcagctgcaggaggattatgggggtttattcccggcattttgaaagcgcgattttacgttcatgaagtcattgtcaccattatgatgaattatatcgcgctgcacatgaccaattacatcatttcaaacgtcttgacagatcatcaggacaagacggggaaaattcacgaatccgcctccctccgctctccttttcttgaacagatcaccgattactcacggctgcatttgggaatcatcgttgcccttctcgcagcagttatcatgtggtttatcatcaacaaaactacaaaaggatttgagctccgggcggtcgggtttaaccagcacgcttcccagtatgccggcatgagcgtgcggaagaatatcatgacctccatgcttatctccggcgcttttgcaggccttgccggagccatggagggcctagggacattcgaatacgcagcagtgaaaggcgcatttaccggcgtaggctttgacggtatcgctgtcgctcttctcgggggaaacacagccgtaggcgttgtactggcagcatgcctgcttggcgggctgaaaatcggcgcattaaatatgccgattgaatcaggcgttccatcagaggtcgttgatattgtgattgctattattattctatttgtggcttcaagctatgcgattcgtttcgtcatgggcaaattgaagaaaaagggggcgaactaagtggacattgtgcagattttatctatcattgtccctgccacactcgtctatgcggccccgcttattttaactgctctcggcggcgtgttttccgagagatcaggtgtggtgaatatcggcttagaaggcctcatgattatcggggcgttcaccagcgtgttatttaatttattttttggtccggaattaggtgccgccgcaccttggctttcgctccttgccgccatggcagcaggcgccctgttttcactgattcacgcggcagcggcgatttcgtttcgcgccgaccagacagtcagcggtgtcgccattaacatgctggcgcttggggcaactttatttatcgtcaaactgatctacggcaaagcgcagacagacaaaattccagagcctttttataagacgaaaatccccggtttgggcgatattcccgtcttgggaaaaatcttcttttcggatgtctattatacgtctattcttgcaatagcacttgcctttatttcctggtttatcttattcaaaacgccgttcggccttcgtatccgttctgtcggcgagcatccgatggcggccgatacgatgggaatcaacgtatataaaatgcgctacatcggcgtgatgatcagcggattgttcggcggtctcggcggcggcgtatatgcctccacaattgcgcttgatttcacgcactctaccatctccgggcaaggttttatcgccctggcagcgcttgtattcggaaaatggcatccaatcggagcactgggggccgccctgtttttcggattcgcccaaagcttaagcatcattggatcactgctccctctttttaaagacataccaaatgtgtatatgctgatggctccttatgtcttaacgattctcgctttaaccggctttatcgggcgggcagatgcgccaaaagccaatggcgtgccttatattaaaggaaaaagataaaacattctcccctgggaagacgattctcaggggtttttttctaatccaaaagacccccttaatttaattgtttattagttttttaacttaaaaaaatatgaagtgttaacgctttcttgtagactgtaacaaacaatacatgggggtgtatgacatgggagcaattccaaaaacggggacaatttcacctgagcaaaaagactcacaggggaaaaacctgtttcaaaaaatctggtcttgggaaatcggtgtgattcctctgcctttatacacagtattagctgttattattattcttgcagcctattacaatgagctgccggcaaatatgcttggcgggtttgccatcattatgattcttggtgtgtttctcggagacataggccaacgcataccgatattgaaggatattggcggccctgctattttatctttgtttgttccttcatttttagtcttttacaatgtactgaattcaacatctttagacgctgtaaccaacttgatgaaaacgtctaacttcctttatttctatatcgcttgccttgttgtgggaagtatcctcggtatgaacagaattgttttaatacaggggtttatcagaatgttcgttccactggttgcaggaacgatcgcggccgttgcagccggcatccttgtcggatttatttttggctatagtgcctatgattcctttttctttgttgttgtcccgattattgccgggggaataggcgaaggaattttgccgctttcaatcgcctactcacaaatactgggctcatctgctgatgtatttgtgtctcagctggttccagccgcaattataggaaacgtttttgctatcatatgtgcagccttaatgaaaaagcttggcgataagcgtccagatctaaatgggaacggacgtctcgtaaaatctaaaaaagcaaatgagattttcaatcaaaaagaagccgaagcaaaaattgattttaaactaatgggagcgggagttctgctcgcgtgtacattctttatttttggcgggttattggagaaattcatcttcatcccgggcgcgatcttaatgattatttcagctgcggctgtcaagtatgcaaatattcttccgaaaaaaatggaagaaggcgcttaccagctttataagtttatttcttcaagctttacatggccgctgatggtcggtctcggcatcctctttattccgttggatgacgtagcgtctgtgatttctataccgtttgtcatcatctgtatttcagttgttatcgcgatgattggttctggatatttcgtaggcaagctgatgaacatgtatccggttgaatccgcaatcgttacctgctgccacagcggtctcggcggaacgggtgatgttgccattttatcggcatcaggaagaatgggccttatgccgtttgcccaaatttcaacccgtctcggcggtgcaggcacagttatttgcgcgacagtgctgcttcgttttttcacttcataaacagaaagagttccgttttatgcggaactctttttttatttattcacaatccgaatatactctcggggaccaaacggcagatcctttgattccatctcactcattctggctgacaggtggtgctccagtaaatacagctcccactcatcactagccgccacaccgctgcgcccgtcatattgattcaacatgaatgcccctgcaaatactgagcagaataaacctgagcacatcacgacttttcttttcacatgaccagctcctttccttcagcttgatcaggattgattttaaatatacaaataacctcttttttgttagacttattttgaggtcaaaagaactcataaaaacccattacagcagttcgaagcgtggcagcttgcagaaaagtgcgatataatttggactaggtcgtttgaccgtatatttcatacatagcgcatttttcaattgagaacgagaaaaggaggtcttatctttgcagctcttacatcttgctattttatcgccttttttatttgcttttatcattcccttcttggcaaaatacgcaaaaagagtgcatacgggctggtttgtgttgatcctgcccgtcttgctgtttatatactttctcccaatgatcaggatgacacaatctggagaaacacttcgatcggtattagagtggattccgtcactcggcattaactttaccgtttatatagacggcctcgggttattattcgctttactgatcacaggcattggctctttggtcactctttacagcattttttatttatcgaaagaaaaagaacagcttgggcccttttatgtctacttattgatgttcatgggcgccatgctcggtgtcgttctagtagacaatgtcatggttctctacatgttctgggagcttacaagcctttcatcctttttgctgatcggctattggtataagcgagaaaagtcgcgctatggcgcagccaaatcacttttgattacggtcagcggcgggctgtgcatgctcggcggatttattctcctttatttgataacggattccttcagtattagagagatggttcaccaggttcaattaattgccggccacgaattgtttatcccggctatgattctcattttattaggggcttttacgaaatcagcgcaatttcctttttacatctggctccctgacgcgatggaagctccgacgcctgtcagcgcttatctccattcagctactatggtaaaagccggcatttatgtgattgcgagattcagccctattttcgccttttcagctcagtggttttggatcgtgtccctcgttggcctctttacgatggtttggggttcattccatgccgtgaaacaaactgatttaaaatcgattttggcgttttcaaccgtcagccagctcggcatgatcatctccatgctcggagtcagtgctgcggcccttcattacggacatacagaatattatacagttgccgctatggctgccattttccatttgatcaaccacgcaacctttaaaggaagcttgtttatggcagtcgggattatcgatcacgaaacaggcacacgggatatccggaagctaggcggcctgatggcgattatgccgattacatttaccatttccttaatcgggacattttcaatggccggcttaccgccgtttaacggatttttgagtaaagaaatgtttttcacaagcatgcttcgcgtgacacattttgacctgttcaccgtgcagacatggggcgttctgttccctcttttcgcctggatcggaagtgtatttacgtttatctacagcatgaaattgctgtttaaaacattcagaggaaattaccagcctgagcagcttgaaaaaccggctcacgaggcgcctgtcggcatgctcgtaccaccggtcattcttgtcgctttggctgtcagtctcttctttttcccgaatatattgtcgtacagcctgatagagcctgcgatgaactcaatctatccgacactgcttgccggccatgagaaattccacgttcacatttcacagtggcatggggttacaacggaattgctcatgactgcgggtattgttgtgatcggaacaattggttatttgtcgctgaataagtggaaaggaatctataaactgtttccttcgaaactcacactcaatcggttatacgataagcttttgactctgatggagaaaggctcttaccgggtcacaaaacaatatatgaccgggtttttaagagattatttgctgtatatcttcgctggtttcatcattctgataggcggagcttttgccattaaaggcggattttcatttaaaacggaaggcatggctaaaatcggtgtatacgaaatcattttgacgcttgtcatgatcagcgccacagtggcgactgtttttgctaggtcaagactgacggcgatcattgcactcggtgttgtcggttatacgcttgcattgttttttgtcattttcagagcgccggatttggcattgacccagctcgtcattgaaacgatttctgtggcactgtttctgctttgcttctaccatttgccgaaactgaggctgaaaacaaaaacgagaacgttccggatgacgaattttatcatttctttaggcgtcggtattattgttactctgcttggtatcgcatcctcaagccagcggacaaaagacagcattgcgtccttctttgtcaaacacagccacgatctcggcggaggggataatgtcgtcaatgtcattcttgttgatttcaggggatttgatacaatgtttgaaatcacggtattaacgatagccgctctcggcatttacagcatgattaaaacaaaagtaaaagaggaggggaaaagcggtgaatgaacaaaaaacaaatgacttgattcttcaaaccgcgacaaaacttgtatcctttatcattttgcttttctctttctatttatttttatcagggcataacgcgcccggaggaggctttgtcggcggactgatcacgtcctcttccatcgttctcttgctcttggcgtatgatttaaaaaccgtgcgttcccttttgccggtcaatttcatttatgtcgcgggagccggccttctgctcgctgtattaacaggcgttggctcctttgtcttcggagctccttttttaacccacacattcggatactttcagctgccgatccttgggaaaacggagctcgccacagcgacgatatttgatttaggcgtttatcttgttgtcgtaggcataacgatgaccattattcaaacgattggagaggaagaataatggaaatcttaatggctgtattagccggtattatttttatggctgctacgtatttgctgctgtctaaaagcctgcttcgcgtcattatcggaacagcactgttaagccatggcgttcatttaatgcttttgactatgggaggattaaagaaaggcgccgctccgattttgagcgagcatgccaaatcatttgtcgatccgcttccgcaagccctgattttgaccgcaattgtcatttcttttggcgttacatcattcatcctcgttatggcctttcgcgcttatcaggaattgaaatcggacgatatggatcaaatgaggggaaatgatcaacatgaataattttgttattttgccaatcctgatcccgcttttgtcggctattcttctgattttcatgacgaagaatcttatgctcatgagaatcttcagcacggcggcatcggccatcgggattgtgattagcggcatacttgtacagactgtcttcacaaaaggcatccagacactcagcttaggcggctggaaagcgccgtacggcattgtgcttgccgcagaccaattcgccagccttctcgttctcacaacagcgatcatcggtttattggttgggctttattccttccgttctgtcggtgaaaaacgggagcgctccttttactactccggcgttcagttcttgcttgccggcgtcagcggagcgtttttaacaggcgatttatttaatatgtacgtattttttgagcttctgcttattgcttcctatatgctgattgtattaggcggtacaaaaattcagctgcgggaatcccttaaatatattgtgtttaatatcgtatcgtctgccctgtttgtcataggggtcggctttttatacgctgtaaccggtacgttaaacatggcagatcttagcatgaaaatcagcgaaacaggacaaaccgggctgatcactgtgattggtgtcctgatgcttttggtatttggcatgaagggcggaatcttccccctctacttttggcttccaggctcttattacgcgccaccggcagcaatctccgcgttgttcggcgctttgctgacaaaagtcgggttatatgcgattgcgagggttttcacattgatttttattcacgatacagcctttacccatcagctgatgatttggctggcggcgctgactgtgatttttggtatcatcggttcactcgcttattcgaatgtcatgaaaattgtgatctataacattattaccgctgtcggcgtgattttgttcggtgtggcagtacacaccccagcatccattcagggcgcgatctactatctgattcacgatatgctgattaaaggcgctttgtttatgctggcgggtacgctgatcgcattgactggaactgcgagcctgcataaaatgggcgggctgatcaaacgctatcctgttcttggatggatgtttttcatttccgctatttctcttgcaggcattccgccactgagcggatttgtcggcaaatttaaaattgcggagggcggcttcgcagaaggtgaatttacgatatccatgctgattctgctttcgagtctgcttgtactgtactctgtgctgaggatctttatacatgcgttttggggcgaagaaaaagaaacgccaaaaccaaatcatcgaacagctaaaggacttctttatccggcagctatttttctcttgctgtctcttctcttcgggttgggtacagaatgggtgtcgccttacgttgatcaagcggccgagacgctgctgaatccggaaaaatatatcgaagctgttctgaaggagtagatcgcatggcttttcaaattttattaaatgtgtttctcgctttttgctggatgttcttaagcaacagtccaagcgccgcaggattcattacaggctatattctgggaatgctctctctctttttcttccggcgctttttcactcgccagttttatctatggaaattgatttctatcatcaagctctgtttcatttttataaaggaactgtaccttgccaatgtcagtgtgatgaaatcagtcttatctccaaaactgaatatcagaccgggtatttttgcttttaaaactgaactgacgaaggactgggaaatcaccctgctttctctgctcattacattaacgccgggaaccttggtgatggatatttcagatgacagaacaatactttatattcatgcaatggatatcgaggatgcggaaaaagcgatttttgacattcgggagtcatttgaaaaagccatacaggaggtgagccggtgatgtttacgctgatcctgcaaatcgcgctcggcattatggcagtgtctacctttttgtatgtcattcgtgtcattaaagggccgactgtgcctgaccgggtcgtggctctggatgcaatcggcatcaatctgatcgcaatcacggcgcttgtctccattttgctgaaaacaagtgcgtttttagatattattttgctgctggggattttatcgtttatcggaacgatcgcattttccaagttcctggagaaaggagagattatcgaaaatgatcgaaaccgctaaggtcgttgtggctgtattcattttgctgggtgctcttatatgcctcattgcttcatttggcgtacttcgccttcccgatgtgtttacacgcgctcatgctgcttctaaaggctcaacattgggtgtcaatatgattctgctcggtgtcttcttctatttgtggtttgtgacgggggagctctccgctaaaatcctgcttgggattctctttatctttattacgtcgcctatcggcgggcacttgatctgccgtgctgcgtataactccggcgtcaagcttgatgagagaagcgtacaggatgactataacggaatcagaaactttgtgattaaacgaaaagaggattcttatctataaaaataagcagccggacaggcagagttccggctgtttttttatttcttgatgacagccagcgtgcatctggatatacagatcagcctctcttgctcgtcatatatgtgaatgtgatagacaatcgtcgttctgccgatatgaacgggctcggctaccgcctttaccgttccttccttgacagattttaaatggttggcgttaatctccaaaccgacacaagcctgtgttgaatgatcaatcaggttctgtgcacctgcgctcgccgctgtttccgccagggccactgaagcgcccccatgcaaatatccgaacggctgcaccgtccgatgatccaccggcatgaccgcaacgcaacgttccgctgtgttttcaacaatctctataccaagcgcttcaagcaatgtgtgcttcgtatccatcatctacacccccaatatttaaagtacaccgtctgatttcgcaatcaaaaccgcttccgtccgggaaccgacattcagcttattaaaaatcgatgtcaagctgtattcaatggaccgcttgcttaaatgaagggcatctgcgatttcttggtttgtaaatcctttttcaacttcttgaagaatcaggcattctctaggtgtgagcacatcttgttctttttgagaggaaggagccggctttgttttttgctgagtcatcagctgtttaaagtaagcaaaatcgactaaaatttctccattgagtacgtggtatatgtattgggtgatcttttctttagattccgttttgctgatggcaccgtgcagacccgcacgaatcgcttcctcgaaataatcctcgacctcataaccggtatacacgataattttacaatgaggattctcttgtaaaatctgtttagaaagctccatcccattgacctcgccgcctagattcagatccattaaaatgagatcatatgacgagaaatcatgctgcttgataaactgttcgctcggttcaggactgagacaatcaacagacaaattcgaatccgtttccaaaattgtcttggtgccttccatgacagccggatggtcatcaatcactagtatctttttcatgttttcctcccttttactcactcttttccattttataaaaaagacttggcctgtgccaagtcgtttccgttataaatccattacaattcgatttcaatatcagccttaaagccctttccttcacttgtttcaatccgaaggcgcccatctaaagccctgactctctccttaatgccagaaagccccatgctcatggaatgctcagtatttttttcttgatcaaaccctacgccatcatcctcataatgaagaacgattttgttttgaatactgatgagcataatcagcacatccgtcgcctgagagtgcttgaccgcattagacagaaactcttgaatgatccggtacaaattcagctgcgaatccagatcaagggaagccgtaaatctcccggtatttaaacggatatgaaacggaacccgctcctgctgctgcgccaccagcttcgacagcgccttcaccaatccaagatcatacagaagctgcggccgcagctcatgacacgtctccctcgtcatcgaaatcacatcagacatctgctcattcatctgcacaagcttgtcctgcacctcttcacggcacggattatcatccttcttaaaatcacccaaaaacagctcacactggcgttttaaggaaattaaatcctgaagaaccgaatcgtggagatcgcgggcgagatccgagcgttgtttttcctcgatcgtgtacatgagttttttgagccatacggggttggattcttgttgttttatttcttctaaatgactcatcagttcttcgattttcatgacgttttcgatcgatacgtttgtataaaaagccaaagttttcagccaagaaagttcttcgagtgtgagacgaggcgtattcattttagataaacaaaggatcacaaatgatttaccaccgcgttcacctattttcatgacaaagcctttattaaattcaacgattttccctatttcggatgttacttttctaaattctttttgatagactttttcaaatgaatttacgttctcatcatcatatagtttaatatttccgtcagctgaaacttcatatacatgtgctcggctaacaagagaaacctcaagtatagtatttttcagttcttcaaatacttgagatagggaagtagagtctcttatcatctgcgtgaatttatatatactgtcttgataattgaatttttctgagaccctttttaatctaaatctgaaatcaagtacttctttataataaaagaccgccaacatgataatataaattaaaaaggttagtttaacactataaaaatcactatcaggactactaattaattcaattgtagagattagaataattgttggcgttagagctaaaaagccatagtaccttaatctgcttaaaataaaatctacattatagattttatttgtcatgaattgaaataccaatgagaatggtatcagcagcataaatgaagccgctaaaaaagaagaaacataatgtgcatttaaaaacacgtaaggtatcaaatataaacacagaaaaggcgaaaaagaaaagatattaatgatagtgagaaccttaataatatgtgcttgttcagtgtctttatttttaattagtatgatactaaaataaacccctactataataaataaaaagaaaaaagcaagtaaatttaatttaggaacataatctcgaaagaaaagatgtgaacgaaaaatttcacaaactacatttatgaccggaatcaaatataaaataaaaactttcttattaaataatttggttcctaattctttgaaatattgataaagaaagagaagatagtttagcggaacagatattaatgttaccaccattataagcctgctcagcatatctcccttagcagaccctccagcacttataaatgcaatagaggcagacaacagaaagataattaaaactacagctgagagaaggttctttgattcatttatttttaatataaaaaagcaacaaaataaacaaacaatataaaatattaacggtattaagtaagtagtgaaatttttatcattaaataaggtcattttcaactcaagattatgtccatttctttccacaatcatcgaacttacattttttagtttgttcatttttatttcgtttgtgtttatctttttattattaatactctttacgatatctcctttttctataccgctgtatgaagccattgaaaattcatctacattggtaattacaatatcgccattttttcctttagagacagttgcccctactaataaattattattactaatataagtcaaataaataacataaatcaaacttaatacaactaacactacagaaattttgttatttctagacttcatttaaacctcagtacttccaatctagcattgaataaatttctaatcctttaaaaccatttattatgcattcagattgatcattatcaacacccaataaacaagcatttccttccattacttcccttaaaacatttgggtatttaattaagtatcctaccatttcttgcataataaatcccctccttatttaatcataacagacaataatttttcagttttatcttctcctagttttaattgtgacatttcattttttattttttggagagataaatgtttcatcaccagtaaatattgtataacgcctgcttctgtcaattttcgcttcaaagccttagtattaattgaaacaaattcctctggtttttgatataaacttagtagctccgctgaagcatcgttaaattgtttctttaagtataagtatgccaatgtattttttttctgaacaaaatcgttatttaagtaaaacaaacctttataatcattatcgatctgtgaaataatcccaagttcataagaataagaagccacgatgggatgatatttgcctgttgccaacattactcccattacacaaggcaatgccgttagcgctcctgatttatttttgatcatttcaagacaggcttcttcagtttgcggcgcattcacaatatcatcatgctggccttgaattgattgtaacgcaaaattcaatatctcttgtgaaaattctggttcatgactagcttgacacatcacttgtatacttagggtgtaaagagctgtaactgcatttaaagcgattgacgagtcaatcttcatccagacagcacttccattatcttgatcctctaagtcatcataaatatcgaatgagagtataagcaattcaattccggcagctagccattcgattgctttttggtcctgaccgttaaaagctaaataatgatgaagagccaaatcggcaaactcaaacgtatccttagactcaataaaattctgaagatatcgttccaagtcctgattcattattttttggcttacaatctccttcattttctccttgatccggacagaatctaaacatatctgctcaataacgacttcccccctcccattccattttactaaatgggacatttaaaggacagcaggtttttcgttttttaacaatcatataatactttatccatttattgtatcggtagaacgaaaaaaaagacttgtttccaagtctttttcacgaaattttcattgcataattgtatttatcgagttgatcaatgcttttgttaatgtttcgtaatgaatctgtcgtttctttaatatcaagttcgagtcggaataacaattgttttacttcttcaagtttcttttccatcgtttccacactcctttttttgaaagatcaatgaattgtgtatggtgaacgagtcctaggtatttgatctgttactaatagtgtatctgctttcggctcatttttcaccgaaaagtatgcaaaaaagtcctgcgtgacaccgcaaatctcaataggtccttatactcaaaggaatcacaacaagaacgggactatctttctatgcgaaagagcgtttatatgtgctgaaattgagaaagattcttaatctccttgattttaacgggtttcgcattttcattaagcaagactatagtccttcataccgtattttcaaaattgaatatgcgattcttggcgtttcctgaccgacaaacaccgaaaaagaccgcaacgctaaagttgtggccttttcgctttgtcatattcggcaattagggatctatacatatagaaacatccttttttgcgaggtgctcccatgagatatcgttatccctggttttacgtgtatccgtatgaggtacgccgtccgcccgctcctgccaacaatattgatacctttatccgttcagcgaggcaggccgcagggatatttgcggatgcccagctcgttctcggccgcattgcgggctcgcgggagctctcgcgccgcattctgacggcagccgagcagtccgataaacaaaccatcaagcgcctgatcaaacaattgggcgtccggcatgaagtggatacggtctttaatcccgacggcatctatatcagtcttatcggaacgcaaagccgaatgattcttgctttgcggtggtcagaggaccgcaatcattttgcgtccataagattatgacaccattccagagcctcaagataacattcatacgcttcttctttgtcgagttgattgcctaattccgagcaagtgtcccagttgttgctttcaattaatttcacaagctcaagcatttggtagtagtcgttttgatggcctaataatgcttgcccgacttcatcttttaaaggcaattcttgaacaatttcctctatttctctatgcaggagggtgtctatgagagaaaacattccgatcagcatataagaagcaggctgcggccgggatgtctttctcgccagcagttcgcaaagctttgctcttatcaaagaaatcttaatgatttcgtgcttgctggaatgccctttcctgcttaaatccttaaaggaaagaatatagatccaccgtttgatttcattaaatcccagcagcataatggcctgttgaatgctttcaattttctggctcaaacggctgtgggatgagtttaaaaattttaaaatttgataggacagtgataaatcccgctctatgtactctgtcacacgctttatgttaggctgctctttactcagttcgttaagcagttcatagtaagaatagaaatgagtcgataggtcatgcccgctgatgatgcgcggctcgctgaaaaagtagccttggaataattgaaagccgtcttggaccgcctgtttatattcttttcgggtctctactttttccgctaaaaaaatcaggccgcggcagccgtaggtttgcaaaattgttctgcgttccattcgtgttgttttgagaaaatcaattttcaatatatcaatatagctcatgagtttttccagtaagtcctcatcttgcgggtttattgcataaaaatcatcaagcgccagcatataccccatttttttcaattctttgcatctagaaatgagggccggcgtgatcggtatatcttcaaggatttcaatgacaagctgtttcggattgaaggaggtaggaagattcgaaaacatcaggctttccgtaaaattaacaaaacagcgtttcccttccgtcagcttctcaattccgatgtttaaaaagctgttgatcaccaaatctgttgttgcctgatcgccgtctttagcgctatacacgttctcttcgctttctctatacagcagttcataagcaacaacctgttcttttctattaaaaataggctgtcttgcaacaaacaccctcattgatttatcccccttacaatacgcgcggctttcacccctaagtatatcaaataatttgacgaaaattgtctaaacatgaaaaataatatatacataaagaaaactggcccttcgtgaacgaaaggccagtttttctttattcttcctcaagctcttcttcaattctgcttttcacttcgtggatccgctgcattttattgctccagcagtcctcgcttaaatcaaccgggtattcctccggcttgctgattctcttatattcctcccaaagcaggctgaggttatcctgcacatactgctgtatgtctgaaatctcagggttttggtagcaaagaatacccttctcaaaaatcagctcatgaagatccttcgcataaaaattcgtgacaaatttgctgatgaatgtatgaaccgggtggaacattctgagccgcttctgatcattcacctgctcatcataaagcgcaatatagtcgccttcagaatgatggttggactgattaataatgcggtagactttctttctgcccggtgtcgtcactttttcaggattggacgaaattttgatcgtgtcaaccattttcccgtcttcttcaatggcaacgagtttataaactgcgccgagagccggctggtcataggcagtgatcagcttcgtaccgacaccccagacatcaatgcgcgctccctgagcctttaaattcataatggtgtgctcatccaaatcgcttgaagcaatcaccttcgcatctgtaaatcctgcttcatcaagcattttccgggctttttttgacaggtacgccaaatcgccgctgtccagacggatgccaatgaaattaatgcggtcgccgaattccttggcaaccctaatcgcgttcggcatgcctgaacgaagcgtgtcatacgtgtcaactaagaaaacgcaatccttatgtgtttccgcgtattttttgaaagctgtatattcatcgcggtaagcctgcacaagcgcatgcgcatgtgtgccggaaaccgggatattaaagcgctttccggctcttacattgcttgtcgcgctaaagccgccgattaaggctgctctcgctccccacatggccgcatccatttcgtgcgcccgtcttgttccgaattcaagtgcaacttcatcaccaatgacgcctttaatccgggcagcctttgttgcgattaatgtttgatagttcacaatgttgagcaaagctgtttcaatcagctgcgcttctaccaggggtgcctccaccctcataatcggctcattgttaaaaacgagctctccttctttcatggagtaaagtgaacctgtaaaagataagccgcgcaaatattcaataaaatcttcatgatacccgagttcatcctgtaaataactcaaatcgctatccgtaaacttgaaattttccaagtattcaatggctttttccaagcccgcaaatacggcatagccattttcaaacggaagccttctgaaaaacagctcaaaaatcgctttcttttcatgaatgccgtctctccagtacgtttccgccatattgatctgataaaggtctgtatgtaatgacaggctgtcatctttaaatccgtactctaacactgtttttccccttccttactctgccacttgcgctccgatgctgtttgcaaaatgggaaagagcccatgcgtgcccctcctgattaaagctggcaacagcttgtttatgcacaacaatcccaaaacctttgttgtatgcgtcaacagctgtatgcaacacacaaatatctgtgcagacaccggcaaggtgcagttcgccaatctgccgctctctgagtttgagctctaaatcagttcccgcaaaagcagaatatctcgttttttccatgtagtaaacattaggctcatgttcatgtttctgatatagaggcaaaagctttccgtacagatcttttccttccgtgccttttatattatgcggaggaaaaagacgggtttcagggtgatattgatccccttcatcatgagaatctactgctaatacgacgtaatcaccgtttgtgatgaattcttcagttaaattgacgatcgcctcttcaatcattctgccgggctccccgcaggtcaattttccgtcactcgccacaaaatcattcgtataatcaatacaaataagtgcttttttcatagccggcctccccgccatcagtatgagaacattatatcttatctccagttgtaagtgaattgccatgaacaaaaagacaaacggtccgtttgtctcttaagatttcagcactgaccgattataaatgtcgtcctgaatatatatcaattcacgattcacagcgatgtcagccgcaatgacgatgcctaaaggcgtatgaaactgaagatcagatacaatcttgaagggcactccgtaccggttcgccatttggatataaggagagtaagactgatactgaagctctccattaatcaaaagggtgacgttatggctgtttttcagctcgtgctccgcctctttatacggtttgcttctaagcacctgtccttttgtcagtgccaaaacgactctttctcttagagaacctaaaaacaagtggcgctcgtcaggctttgtctccaaaggcccatacattccttgctgcaaatagagatccattttatcttcactcaaaagcctgtcctcccgtcttgtttgtcttcattatcacctgatcaggcaggagctaaactttcaagcgccgtttacatttctgttacccaatgaatgatttttttggccagctcaccagcagggatttcctctgtatgccggcgcaacgacgcttccagccgttcaggcagagttgctttatcttcttcataggaaatgatcgtgctccactccagctgcggtaccgctacaagcgtgcgcagttcttttctgttttcatgcagatacacgtccgtgatcattccggtttgcgtattgatatttgcttttctgattttcataacatgacctctctattcaaagactacccatattatacaataaaaaagcaacagcctcttgtgaaaaggctgttacccgttaaacgaaactgtttcatcagtgatatcggcatctttgaagagagttttactcgtttggttgttaatcttcacaaaatcaccaagctgaaatgtgcctgaccccgcccctgaatgagcgacgcttttgggcgaaatcgcaaatacgtctccaaagcttgccgcggcattatccgtaactgacatgatataaatcggccccacaattgcaggcatttccccacctccgcattgatttacagcatcatatgcaaagagccgataatggtgccctcctattcagctggctttgctttttcttcgagtcgtgaccgctggcgcagcttgatcaaacggacaatattcaggaagaacgccttcactaccgcataaaccggcaccgctaaaatcatgccgagaattccgccgaagcttcccgctccgattaatagcaaaataatcgtaagcggatgggtattcagccgctttccgatcacaagaggagacagcaggtttccgtccagctgctgaacgatgacgaccacaataatcgcaaacagcgctttggccggcgagtccataaaaccgacaatgacagccggcgcggcaccgagaaaaggcccgacatagggaatgatattggtaatcgccatgacaatcccaagaatcagggcatacggcagtccggcaattaaatagccgataaaacacgctgttccgacaaaaagacagattaacagctgcccctggaaatatgccgcaagcgtatcggataaatctttaaaaatctttaagccttctgtccgataagaagccggtagaatttttactgccaaatgcggaaagcggtgtccgtctttcagcatgtaaaaaaggataaatggaacagtaataataacaagcgtgatgtttgtcacgacaccaaacaccgcagataaactggacgtgatattttgcggcaggttttggagaaaacttgtcaatgactgttcaatttttgatatcgatacataatcctggttcatcatccaggtaaaccattgagaatgggacaaatcctttgtcagcgcctgaatctgttttatataatcaggaaggttgttaaacagccctgtcacctgtgaggtgatgataggtccgactgacgctgaaataaaggcaagcaaaccgataaacagtaaatagatcaataggatggataatgtccgcggaatttttttctcaagcaggcggacgaccggattaaatatgaaatacaaaattcccgcaattagcatcgggaaaaacaatgtcgagataaaaacaataaacggctgaaatacaaatgaaacttttgttgctacataaataatcagcaaaacaaataaaatctgcaatgtccaaaaatggacttttgatttcaacaagctttgttcctcctagtttttctttgtctgtcagataaaagaacttataccccatcattgtaacaaaaatgaacccatatcagaactcttaatataatgaaaggagtgttggtgatgaaggccgtgacatacgatacagattcagaactggcttatatctatgttcttcctccgaaaaggaacaggaatatacggtctgaggagcttaaagtcaatgattgtatcctgctggatatcgaccaagacggcaaaattgccggattcgaatgttttggtgaggcagcacacctctgtgccccatttgccgggaaatcccggctatatgtaaaagattcagacggttatcattttcgggtctgccagcatgcttcagtccgttcctgctatacagtgtacggcgtcactttctgtttttcagatggtgactatcaggaatttgccggttttgaccttgacggaacaatgtatcatagtgcgtttttacagcgcttaactgaaaaataggacgtcccggtgtacgcctatttttcatgcgcaagcactgttagacccgctcactgtaatctggggtgacggaaatcatgtgctggattctgatcaaacaaacagaatttcgggctccttcaattgtgatatggtcaggtttaacatcgatcagtctgcctctgaccgtatctcgtactgtctgtataacgaaccttgagccgatgagctttttaatggtctgatagacataaggatcgactaaagagaccagttgcggactaccttggttgaccatatttttatcccctttgtgtgttttatctcagcttatgccgcgcttatggataatgacacaggcttacctgataaaacaaaggggtgcggagattttaggagaatacgtttggaagcggtgtaaaggaagtatcgatgaagcggagacagcgaagaaagctggcgctgttccgtacttatacaggctttatcacggatgcctgggcttggtcgattaattggtccagcttttctattttttttcgtgcggttgaaggatcaatttggcggtaatgatgatggccgcccggctcttcatccagttcgtccgcttttttgacaatctgctgcagtgtgtttttatctaattcgccttcaggcaaataggaatctgtatgaagcaaaatggctagtgcaatctcttttgctgctttcggttcctcgccaagccgaatcagaagtttatgcgcccgttccgcccctttaatggcatgaatgtcatttcttttgtatttctcataatcccactttccgtctgtataccattcataatggccaatgtcatgaagcagtgccgcttttgctgctaaatcaggattaatgtcagccttcacagacagcctgtatgcatgataagcgcaggcaatcgcatgtgccacgccggaacgctgaagatatttttgtgcaattggatgggtgaaaacatccattaatgtaacctttctcatggaaacccctcctttagatatttttagaatcctaacataatttgcagagaaactcaattcttatgtcacatcattttgatcttcttatcatcattgttataccctaaaagcaacgtttcagtcagtatatgcggctgttcaataaaatgcgctggctgtagccttttgtataaaaaaaagagcagaaaatatctgctctacaaaaactctttaatatcataaatgcggccgttttccgtccctttttctagtaaagaaagcagcgtgccggcaataaagtccggactgcgaaggcttcctgtttcatttaatttccggaatcgttcaatgtggtggaaatcctttttcgatgaagaacggatgacggcctgcatctcagtgtccatcactccaggtgagaacgaaatcatgttcactggcagctcttcatcctcctgttcaaatccgaatgtcctcgtaaacatgtcgagcccggcttttgaactgcaatacgcgctccatcccttatatggatttttggcggctcctgaagtaatgttgacaatcgtctttttgccgctgtatgaagcaaaccgttttgtaaacagctgactcaaaagcacgggcgcagtcaggttcagctgataatggcgctgaagctcgtcaagagacgcttcgccggcacgtttgatcggcgttaccattccggcgttattaataagggtaataccagaataacgatctgaatcgatggatgagagcaatgtttcaaattgctgttcagcttcttcgagattgatgaggtctatttgatgctgcgttagtttttcatgagagacatccgttttcgttctggataaggcatggacttcatgccccttttctaaagcctgtaatgcaatggcttgacccagcccttttgacgctccggtgatgatataaagttccattggaaacctccttttccgttattattgtacggcaccgcttttacacaacacaagcacgcggcctacgctttcttgttttcctgcgctgtgacttttgggatgaggaacacgatgcctgcaattccgagcaggatcagtacgacatagatcatcggcagcagcaatgatgatgtttcttgttcatcttctgtttccgttgatgatgtctttgttattggtttatctgcaaatgtaattccaagctgtttcgactgggccgcaatcgtgttggaatcctcggcatttgttgatgtaaacaaatcttttatcagctcggcgtccttgtccttcggtttatcaaaagtgatatccttttgttcctcaggcagttctgttttttcttcatagtaggtatcttcatgcaaataattcgtatcgatttcgatgtcttttttctcatactggtttggcgcgacatctgtattttcttcagtttgggcagcagctgcagagggtatgaaaagggaaaaagagagcatacaaatcatgatccccttttccatgctgcgattacgcttcatacgtttcatcgctttctgctgtgtgttcagccatcagccggataatcagcggcagagccgcggcaatcaccgtaatgatcagcagaactgttattcccattgtaaacaagtgcccagtaccgtactggatgtcgatatatactttcgaaaccggatcttcaaatgtaaagttcggcatgatcaaatcaataagcggtgcgacatagaataggatcattgctgctgaagcaacccagccagggattgatccgaatctgaatgccgtccggatgaaggcagagcttgcgaccagcaatagaatcgtaaacaccgaccacttaatcgtctgatcgtccggcagtgaataaatattcaagccgaacaagctgatcataagtccgacaaggatattcagaattccgaataacgctcctttgacgagaagcggtgcgttttggtaatacgagctgaaatagccgattaacagactgctgatcaacacaatgacaaggatgacaaccggaggtaccgtctgaattttttcttccggaacctctccgctgattttaagcggattcgctaagtaatcatatacatagccattgttttgcccgtctactaatgtatttccgagtatgccgtatacgtcatttcgcacgagtttcgtggaggcgacatttttcccccagttgttgtttaaggtgtcggctttcgcttgaacatcattgacgctttgctgcatgttggttgtgtaatcaatgatgccggactggcgatcagacaatgaacccatcatgtctgacatttgcagcacttcctggccgaccgtatcttggacactcagtgccatggtgccagacagcccatcgttgctgaacgtcgcagattcctgtgttgcgcccgttacaagctgttctgacgcttttgcggcactttcagagattttcgtcagttcgtcgagaacacctgcttgagagtcacggatatagccgctgtagtcgtccgcaaatttggtcatgccgtcgatgaagctgttaatatcctcatctgtttgcatcgtgttgtttttgagagcttcccagctggctgattcttcaggtgtgagagccaggactgatttgacgttgccctgctggccgtcaatagcgccggcttttgcagcactgtcaatcgtaccggataatacagagtcataaacagacaaatatttatagtatctcattaaagcggagatgctttctgtattgatttctcctgaaaattgaagctgatctttattttcaagctcgcgaatcgcactgtaaatcccttcaaactcccgcttccgtttcgcttcgagattttcaagtttaccttcgagctttttcactttgtctttcaggtcatcaatttcatcagtgagaccattcatttgctctgttagttcctctaacttctttttcaactcttcattatgagcagtttctttttccttcagttcttcttcaatttgcttgattcgctcagacgctttgctgagctgttcttttgctttggcgatatcagaaatgtcatcgtttcctggttgctcttggtccccaggctccgtcgtatcttcgccgctaccggtatctcctgaatctccggttccgccttcatttgccagcttgataaattgaagggctgaatcagaagatgcagtctgttcggcagatgtgcccgtttcagtttttccgctgtcggacgcaccatcagaggcatcgccgttctgctcctgaccgtctgttcccttctgctggtcttgatcctgagtactgccgtccgtttgtccgtcattaccggtatcactgctgttattgtcgttccctgtgtcgccctgtgtatcatcgggctttgtactgcccccgtcatcaggtttttctggattatcagtggacggatcgtctggttcagtacccgggtcctccggtgttgggtcctctttttcaggctccttcagattgtctgaaatatcctgaatatcagcagcgatatttttcagttcttcacgctgtttttcaagatcaattttgagttcttcaggatcttcttctttagggtctttatctttatcattgttgtcagaaccatcgtctatgactgggtcgtcccctttcgcaactgtcaatgcctgacgtgccgggacaagcaattcatacacctgatttagtgcagcctgtcttgatgcggcctgatattgttcgattaaattactttggatttttgccatgccaagttcctgctgtgacacttgcccttccctaatttgctgggcgtttgccagcacattactggtttgtccgagctgtgacttcgcttggccgatcccagttgccaatccgctcatgcgttcgctgaactgattcgccttttgctgtgcctggatggcatccagacctgtccggatttgctgctgtgttgaatcctgggctgccaaaagcagctttttctgattttcttgatattccttgtatctttcaactgtatcaatgaattctttcagcgtatttttggcttcctccgctgtagaagctttttcttttgtcgtgccttgcgcttcattcattgatttcttcagctcatcgattaaatctttttgctgtttgatttcacctgctaaatcattagagcttggtttgtaaaagttgtacatgacattctggaattcagattctttattgacgattttgtcaaattctcctctgatgttgtccactttttgcgacacaaagttccagtataaggctgacatttttttgttcattgtcttttgggcatcctcaagctcacgctgaactttttctttgttgaccgcattcaggttatcttgaatgctgaattcaagcgttgctttttgtggatggtctttgtcatagctcaaaatgttttttgagaagtctgagggaatgtagacgatcgcatcgtatttttttgacgcgagaccggtctcagccgcgctacggtttacgaccgtccacgaataatcaggacgttcacccagaacagccgctacttccttgccgaactgggcggatttgtcctcttcatcagactttacctcatcactcaatacgccagtgtcttcattcaccaccgcgatttgccgggtggaattgactgcttttttcgtcgggtcgtctccgataaatcggaaaaacaacaccggcagcagcaaaatgatgatgacggcggatattaacttgatcaagctttttcgttgttctgtcatctagcactctccctttcagcagaacataaaggaatttgaactttttgctccttcccgttttccacaacatatccgaagcccggctgaatctcaggctcctgtctttggtacgggagaggaatgacattttgctcagactttttcatcagcagaatcgcgtggcggatttgcttcatctcagtcgtcaaggagtcatagccttttgagaattcgctgtggtttccgcccgggataaagctgaacccaagatgagcgtatgatttcatgaagttagcgagacgatcttgtattctcgtatcaatcgtctgctggaatctcgttatcccgtcaatcatcagcaccacttgtgagaatcgaagattttgcgcgtctccttggcggacggcttctacatacatggcttctcttgttttgaaaatgtcttctgctgtttcaatccactgctcaatatcttctttcgtttccaaatatgaaacatctgattccttcgcataatgagataagccgcggtcaatcgagtcaaacaggccgatcatttcggtttcatcatcaatcagatgttcgagcatgacttttaggacgtttgttttcccgcgctgagtctggcctaaaatcaggcagtgcttatgcttgcccaaatcaaaatagactgggctgactgtttcttcatgaagcccgatcggtacagataaaggcttgcgttccagcttgaagcggagagaaaattctctcgttgtcaggctctcaggcagcatcggaatcggtgccggctgctccaatgaagcaaatcgtccttgaagtttctgtacgtctgatttcagctcgttgaacatgccgatatcatcatcggcgtcaacaggcaggaacatttgcgcgaaataaagctcttccttttgaatgatgacgcgtcccggaatcggctcaagattgaatttcggacggccgtaaatggaatatccttctgattgatccatgagataatggacaacctttgttttcaagttatttaacaatgactggcggacagcattcacccgcgttgctgtcagcataaagtagatacccaagctttgtccgtctctggaaagctggacaaattccgattcaagctcatgcatctcatccttgactatgtcaaagttgtcaatggtgataaaaatgaatggaagctcttcttcgctcagcgcattgtacattttgatgtggctgatttctttttcccggaacaaacgtttacggcggtcaatttcttctttgatgcgaatcatgaacttttcaattttccttgactggtccatcaggaagtaatccgcggtatgcgggagcttcgctaatggcagcagcgttccgtttccgaaatcaaagatatagacatgaagctcttcaggtgtgtatacgtccgcaaaactcatcaggaacgttgcggctgcaatcgattttccgtagcccgaagagccgaagatgccgatatttccatcttccatcatcttataagcaattggcgcctgtctttgcagatcaggttcatctacatacgcaaagtggaaatggtctttttcgtttgaagggaaaagagtgcgcggaatacgttccgcaagcggcggcagccaagggcttggcagcttctcaattcccatttcatcttggatgcgttcaatttcgtcaactacagcttcgatttcggtttgaacgtcttttttcgcgatatcttcggtatcaacctcagaaagcgggatcagacccgtatctgtaacgatcgcgatttcatcctcggtaccgtagacttcctctaagtaaggcgccccgctccatgcagattggaaaagctcatacacttcattgtttccgacctgcaaatagccgcggcctgttacggtaatgtttgcggcatcgctgtttttcaaaatttctttactgtcggtggcatcctggaccttgagcgctactttaaagcgcgagttactccagatctggtcgtcgatgatgccgcctggcttctgtgtcgccaaaatcaaatgaactccgaggcttcgtccgatacgcgcggcactgacaagctccctgataaaatcaggctcctcgcttttcagctcggcaaactcatcagaaattaagaacaagtgaggcatcgccacttctgctttcccttgcttgtatagctttgtatagtcattgatgtgattgacttgatactggtcaaacaggcgctgcctttttttcagctcgcttttaatggaagcaagcgcacgcatactgaagtttttgcttccttcaatatttgtgatcgtgccgaggaggtggggaatgttgcggaacggctgcgccattcctccgcctttatagtcaattagtaagaaagccgcttcatgcggatgaaaatgcactgcaagtgacaagatgtaggtctggagaaattcacttttccctgatcccgttgtccccgcaagcaagccgtgcggaccgtgtgctttttcgtgaaggttcagatacacaatgtcatctttccctttatagccgatcggcactgacagcgacttcgacgattcacttgtcagccatctttgctgaatgccgatttcttttacttccttcgcatgaaaaagctccaggaacgataccgtttccggaatggaattcgtaatgccgacctggtggttcagcgtccgcagcgtgcgtgagaaccgttcgttgtcctcacgctgatgatgatcgagacggaacggaattcttaccgcttttttcttttgtattaaaatgtcgccttcatgctcattaatgtagcggacaagagttgtaatgttttccgacaagctttcctttgtttccgccgcgacaattgtcgagatgcccagatgctcatgctgtccttctaaatattcgagaatgacatgctcagagatcagctgctgattcgtgatgacaaatacaaaatgcggtttgaactgcagtttttctttgtcatcttcgagatcacgctctctgatcaattcgtaaagtgaagacaagagctgatctcgggtttgctcattataaataaatccttttgcataaatatggggcatttgaaattgcggaagccacttcatccactcccagtctttatactcttcttcatgaaaaataaatacaaaacgcaaatcgtgatagctgttaaagaacgacagctgtccgattagctggtgaatctcatttttcacaatttgcgatttaccgacaagccccatcggaccttctgccaaatcgaccgtcaccggcgcattgcggatatctttatagacgcgctgcatgtgctgcgatttctccatgaggtcatcgatatcacgattcgccaagtctccgccgctcatattgatttcatagcttgacggaactgttcccgtcccaagccgcagctggagataatccttgctttcaagtgatttttcccagatccggtcactgatttcacttgttaagtatttcatttgttcaaatgaaggaaagtgaaattcaagaacctgcttttgcttttcagcaagtgcctgaagctctttccgcttattgtctaagtaaagcttatatacacgctcccgtttttcctcgcgttttttccgctggtttttatcccggaaatattgcactgtcgaggtaatgagagtcatcataaacatcgccaaagaaacgagtataaatatgccgcgcggctggatgatggcaactacgcccatcacgatcagcatcacaagcggaggcaggatgacgagccacagccctctgttggtttgatcgctctcctgagagggaaaactgaaagaaacgcggtcatccggcagatcgtataccatccgcggcgttcttctgtactgcggatattttttctgcatttctgtactcggtttgaccgtttctgttaacgctgtttcaaactgggcataatgaacaatttctaaaaggtcttgttccgtcaccctcatttgcgtgaagttccagaatatctcatcccccggcttgagcggcgtattggcgttgattttctctccgttcaagaagatcgttccgctttcaggtcggaccgaccagctgccgcctgcacgaagcaaagaaaacgtgctttgttctgcaaatgcaaagtcttgcggattcagataaatatctgcattcgttttttctgaggaacatacaatttcatcccggtttcccgtaaaataaacggatttctcaggttcactgcccgtcaatatcaagcgtatatcctgctgatccgtttggagagtaaatgatatatccgcctcaatcgtgccgagacaatcatttcccaggaaaacttcgtattggccgccggattcctttcttttaagagaaatcactccgctattaaatggaatggagctgatcgtaacagaatccttcacatcaggccctatggtcaccggatgagacgacgggaggttagacagatttaatttttgaacgttattttggtaaaaaacccataatagactcaaatggcgaacccccttacggccgaatggcagcatgcgatgacctgcgcttcatgtctcacgttatttgtcatcttttttctcatctttcttttctgtttcttttttctcgtcttcttttttcttctgttcttcttttttcgctttttcctcggctgcggctttttcttctgccgctttctcttctgcttgtttttcttcgtctgtttgtgtctgttcttcgcttgtatcgactaacgatgtttcagaattagactgtttattttcttgacgttctttttgcgctttttcaagctcactatttactgagtcaagttctttttgtatgtcttcatcatttgtatcctcagataaaagctgctgtttatatttagctagggcaaagtaaatataatcattgtattcaagcttacggccgatactgatcgcttctttgtattctcctcgaccataatcaatccaatataagaaatgctgagggtctgattgaagggtgactaaattattttctatatttttggtttttgcactccccaggttttcgacctcaacataggacgtcgccagctgatactgcaccgattcaggcaggctttccgcatcgtacttggacagtgtgctgatgacttcactgtactgcttgtttaagaacgcacggttgctgtccactatcgcttggtgctttggctgcgcgaaaaataaggcgtacatcgaataaataagtgccggtacaagcaaaacaatgagccccaagccgatatatcgctggatgttccacttctttctcgggatatgtatgtatgtttttgctttggcttcgagctcatcaatatgggtttgaatcagctcgagcaaatcatcataggattcagcatctaatatcgcctttgcctctgcggagaacgtcagcgtttcattgaatttcaggtagtcttcaaacgcaaaagcgccgtcaactgccaaagccgctgccgctttcagctcctgccatactctttcctcatcacgctcgtaaggaggaatgctttcttttactccataatggagaaaataaggcgtaagccctttatcgaatacaatgttttcaggagcgacaatcaaattcagcctcgacagattgtgctgctgtacggcttgaacaagctgataggcaaactgccatttactttttttatccttagctttcatgaagcggaatgctttataggaggagggaggttggattgtgatgattacttcatcatccgtcacatcgatttctttatgaaaaaatggatttatatctttgatcacgttagcttcaagaccgtcgagaagctttattttttcccgttgaaaggtaaatgtatagccggcatctgttttctcggcaacagcttctaattggttttctaaatatgatttttgttcacctgacattcaaccagatcctttcataatatttcaagccggtctccgtttgtaatgccgcaatcagacagcttgcattctccggaaaacaccttatccttgttcaccactctgatccagtgcccttcgcgcggaggcatagatacgctttgggcctgccaagcaatatcaattacttttttcaccgggtggtaatctgacaatctgagatcaaagacactgccgttataatgtttcaaatctattgtaatatcaatatacatttaggatcacccttacatagaaagagcgccgtcttcttttgaatcaggcgctccttccctttcatactgttatccgcggatttgatttgcgatgtcttggtcagtagactcaagtgtatttgctgtttgatcaagctgctgattcacatcttgaagcaaatctgacattttgataaatgaaggtttgagctgctcgtattgatctgcgaacgcttcgcttgaagcaccttcccacatgcttttcaaatcagagatcattcggtttaaacgatcaacctgatttaatacttcttggctttcaacgccgtattgcttcgccatcgctcttagctcttcgggtgtgacacgaattaatcctgccatattcctcattacctcctgtgccatcagcctaaatatgggctaattcacttatttttagaacgtcattattataaaaacagtttttcggcatagtcaaacaaatatgttttaattttacaaaatgagtccaatggtttaccccgaatcacttaaaaatgacatatactgtaaagtaaataggtttattttcttaatcttctcttcattctccgaataatccaaaagacccaaataactccccaactcccaaaaaaaacctttcagaaaatttgatgctacagcaccatttctgaaaggttcaattttttctttccttaattagtctcgcctccgatgactttcttagaagattaataggataagctgtcgtattatatgaggcatacaactgtcctgcaaaaaggcgattacaccgccaaatgtatatagaacgtttctctcatgaaattgtttttttgcttctgttctttgttgttgattttcacaaacaacaacaatcataataaaaggaaggggatgagatgtcaaagagaaatcaagcacgaaaagtagggagatttatgaccatgccgaatgatccgtttaaatatagttttgacagacttgaagatgtggctgatcatatcagcgacgttctgcggtgcccgatcaccatagaggatgttaaccacaagctgcttgcctacagtacacacagcgactgcacagaccctgcccggacgtctaccattattggcagaagggtaccggagaaggtgattaacaagctgtggaaagacgggacaattcctgctctcttaaaaacggaccagccgatcagagtcaagcaaatcgatgaagtcgggctgagcaatcgcgtcgctatttcgatttggaaaaacaagcaagtacttggcttcatatgggcgcttgagatccaaaaaacattgtccgatgaagatctgctgacattgcaaatggcagcaaaagcagtgaaaaacaagcttctcaaacttcaaatcagaaaaacgaaaaatgaagaacgcagccaagaatttttctggaaaatgctgaccggacacatccatcaggaggatgatatggcggatgggttccataagcttggaatggccgctccttcagagttttccgttatgatcatccgcataaatggcgagctgactgaaaaaatcgaacagcagctgcaatatttacaggaaacgacccagcaggtttacgtgctgctggcgaccgtagattccaatgaacttattatattaacctcacccaaaacagatcatccttttcaagatttaaaacagtttgctttaagtacgcaaaaacagctgaaggagcggtataaaatagaagacgtttctatcgcttttggcggaatatacaactctatttcttttgtctcccgctcctatcaggaagcattgtccgtcttaaaaacgaaggaacggttcgctgaagagaccaaacattttttcagcttttctgagttaggcatttatcaatacttagatgtcttaaatgaaaaacggaaacaggcgggccattataattactcgctttccaaactggaacaatatgaccgggatcaccagtcaaatatggtagagacgctagagcgctttattgaagcagacagcaacgtgaataccgcttctaagctgttaaatatacacgttaatacgttgaattaccgactcaagcggatcagccagatcgctgaaattgatttgaaaaatgtgaatcaaaaattcaccatctatttagatatcaaacttcggcacatggatttgtgaaatttcacaaatccatgtttttttattttcttaatcaaacaaagaattttccaaaatatcaagctacactaaaaatatcacagatacaggaggagacagatatgatcataggggttcctaaagagataaaaaacaatgaaaaccgtgtcgcattaacacccgggggcgtttctcagctcatttcaaacggtcaccgggtgctggttgaaacaggcgcgggccttggaagcggatttgaaaatgaagcctatgagtcagcaggagcggaaatcattgctgatccgaaacaggtctgggacgccgaaatggtcatgaaggtaaaagaaccgctgccggaagaatatgtttatttccgcaaaggacttgtgctgtttacgtaccttcatttagcagctgagcctgagcttgcacaggccttgaaggataaaggagtaactgccatcgcatatgaaacggtcagtgaaggccgggcattgcctcttctgacaccaatgtctgaggttgcgggcagaatggcggcgcaaatcggcgctcaattcttagaaaagcctaaaggcggaaaaggcattctgcttgccggggtgccgggcgtttctcgcggaaaagtaacgattatcggaggaggcgttgtcgggacaaacgcggcgaaaatggctgtcggcctcggtgcagatgtgacgatcattgacttaaacgcagaccgcttgcgccagcttgatgacatcttcggccatcagattaaaacgttaatttctaatccggtcaatattgctgatgctgtagcggaagcggatctcctcatttgcgcggtattaattccgggtgctaaagctccgactcttgtcactgaggaaatggtaaaacaaatgaaacctggttcagtcattgttgatgtagcgatcgaccaaggcggcatcgtcgaaactgtcgaccatatcacaacacatgatcagccaacatatgaaaaacacggggttgtgcattatgctgtagcgaacatgccaggcgcagtccctcgtacgtcaacaatcgccctgactaacgttactgttccatacgcgctgcaaatcgcgaacaaaggggcagtaaaagcgctcgcagacaatgcggcactgagagcgggtttaaacaccgcaaacggacacgtgacctatgaagctgtagcaagagatctaggctatgagtatgttcctgccgagaaagctttacaggatgaatcatctgtagcgggtgcttaattcacaatgagcttgcagaaagatttctgcaggcttttttattttttaaaaggaaaaaagagaccatttcacgaattatgactatgaagttgatcataaaggaggattcatatggctgttcagcaatatggcgtgttaaaaggcatagtcttagacatgaagcgggaaacagatgatgacagtcctcatttccaagtcaaaatgctcggtgaagagaatacgtattacaggtgcgccatcaatgtgatgtccagttctgaggaatctgaagtattgtatttggctgacgatcagtttgattcgggctcaattaccatccttccgaacatgccgtatggatatacaaggatcaatgaagcaaaccgtgaagtggcactggattatgtgcggggcaatttgtttgacccgcgggaaatgaagcctttgcctcatgaaatcacaggacctgataatgatttaaatgattttattgaaacctatatgaagaaagcacaagatgagaaagcgccggtttatatattcggttcaaaattcggccctgaacaggctgcagataaaatattcggctttaccccgactaacggaatgcacaatatccatatgaatcaagggaatgcaatggatacgcgctggaaaaaagacaacggctcttggcatgacgggggtattctgattcagtttgcagatcagtgggccgctgtgtttttagcgtttttatcccaatcttggtgtaccgatgaaaacggaaacccggtcagagattgtgatcatacccaaacgtctgcgtaagatagaaaaagagactgcggcgagcagtctcttcggaagtttgttgacaaaatcctaaagcgttttaaaagctttaggattttgtcatgttttcagcgtgattgaaaacccttgaactctaggaaagatgagcattggagcggagcgaatgttctaattcgtgagcaccaacgcgcagacttggcaacgaatgcgagggtttatcgacacgctgaagagactgcggctagcagtctctttttgatcagattacacattttcaacagtctttaggctgtttggcctcatatcgctccaatgcgattggatatagtccaaacaagcttcacgccctttttgctcatgaacgactgtccagccgcttggcacatctataaaaccgggccatagggaatattggccttcttcattgatcagcaccaaatatgtgccatccgcattttcaaaaggatttgccattctatttctcctcccttatttattcaactcttccagtttgacagcgagaaccttgccgatttgagccagaggttccggctgacataaatctttatgacggcagtcgatgtcgatttgttcaatctgtctgctaatataaggcttccaagagtcaggttcaatcgggtcaaaccattcaggaatgattgttgatctgaaaaacaaaacatttccatggaaggttttcggcttataggaacctaaaatgccgacagaattgacatacgtattcttcaaatttaaaatgaccgtttcatccaggctcgcaagcgcactgccgtcacggcgaagaatctcaatcgccgcttcaaaatctagcggtttgtcccctaagctgtctggatcgtacccgcctaacgccagaagggcaataagcgcttcctcatcatccggtgcctcttttataggaaggaagtggttcggataggcgtccagcatcaccaacagggatacttcttctccttgattttgcagctgggtagccatcgcttgaacgacattcccgcccagggaccagcccagcagatggtatggaccttttggctggaccgttcggatttgtttaatgtaatcggcagccatgtcatcaagtgttttcggaagctcctcgcgctgcccgattccccgtgcctgcaagccgtagattggataatctgttcctatattggtcatcaaaccggcataacaccagctgagcccccctgccggatgaacacagaataaaggaggcttgtctccacttgttcggagcggcagcagaacgtcaagagcgctttggcttgatcccatttcaagtctttcagcgagcccggctacagtaggtgcttcgaacaagttgccgatgctgagttcaacgccgagcgcttcacgaatgcggctcatgagctgtacagcaagcaaggaatgtccgcctaaatcaaagaaacggtcatcaatgccgacacgcggcaagtgaagcacctccataaagaggtcacagagaatttcttcctgtggcgttctcggtcctcgtcctgtcactgccgctgcgaaatccggagcgggcagtgctttacgatcaagctttccattcggtgtcagcggcaattctttcatcatcacaaaggccgcaggcaccatgtaatccggcagtctctcagcagcatatttgcgcagttccgccgtatcaaatgtttcttccgaagggatgacataagctgccaaccgtttatctcccggctgatcctcacgaacgattactgccgcatcttcaagctgcggatgctgaacaagcgcggcttcaatttctcccaattcaatccggaatccccgaattttcacttgatggtctgcacggccgacatagtcgagagaaccgtcagcgcggaggcgggccacatccccagtgcggtacatccgggtgcctggaggaccgaacggatcagctatgaagcgttcagatgttaaaccaggccggcctagataacctcgtgctaaccccgctcctgatacatacagctctccggcaacacccggcggaaccggctgcaggcgttcatccagcacgtatacaccaagatcgggaatgccgcagccgatcaagctgtttgcccgtaaagctgccatgcttcggtctaattcgatatagctcacatgcaccgtcgtttctgtaataccatacatattgataagctgcggtctattttcagggtggcggttgtaccaatcctctaaacggctgagttcaagcgcttctccgccaaaaatgacatagcgcagactgagtgcctgtccgagatccggctgttcccgttccgcctgcataaactgatagaaagcagacggtgtctggttcagaacggtcacaccctctttgacaagcaggcgcagaaacgcttctggcgatctgctgacgtggtgaggcacgattacaagacgtccgccatgcagcagaggaccccagatctcccacaccgaaaaatcaaacgcataggaatggaacatggtccagatatcatctgagctgaaacggaaccagtgctcggtcgctgcaaataaacgtgttacattttggtgaggaatcatcacaccttttggaacacctgttgagccggatgtataaatgacatacgccgtattcaaaggggaaagcggctgagtcctatccttattttttggattacctgcagggtacgtgtttagtttctctgccagctcgggatcatccagcacgattttcggcacgttttcaactggcggaatgtgatttgcagctttagtgttcgtcatgataaacgcaggctgtgcatcttttagcataaaagcaattcgatcagccggataatccggatcaagagggagataagctgccccggcctttagcaccgccaataggccgacagccatttccaacgatcggggcagtgccaatgccacaaattgctccggcccgacaccttcactaattaggaatcgggcaagccgatttgctctttcattcagctctgcatagctcagtgcctgatcttcatatacaacggcaatagcatcaggacgtaaagcagcctgcttctcaaactgctctggcaaacttgcgtgcggaatcttttcagatacactttgccaatctgtcaccatgctgctgcgttcctctggcgcaagaatatccagatttccgatttgctcgtcaggatcagactcggcagcctccaacagccgcatcaaacggtcagcaagagcctgagcagtttcccgcttgaaaagatcagtgctgtattcaagcagtccttccattccgtttggtgtcccgtcagcaaggcgatcttcactgatttccagcgtcaaatcaaacttggcagaaccgacactgttgattcgcaggctactctccatatcaggaagatgcaattcagcgtccggtgtgttttggaacgcaagcatgatttggaataaaggatgcgtcgcacgcgaacgagccggattgagcacctctacaagtctctcaaacggcagatcctgattgtcataggcggccagattcacttcccgtactctgtctagaagctcacgaaagcttgggtcaccggacgtatcagttctgagcaccaatgtattaatgaacagccctacaagatcgcccagcgcatcatcattccgtccagcgatcggactgccgatcggaatgtcggtgcccgccccgagccttgtcaataaagcggcgagaccggattgaagcaccataaacaggctcaccctatttgcgcgagccagctcctgcaatcgcttatgaagctcgggctcaatacgaaaatgaatcgtatctccatcatgactcggctcagccggacgtgaataatcggttggcagctcaagctgatcaggcaggtttttcaaggtttctttccagaaagcaagctgtccggcaatcaagctatttggatcatcctcgtttccaagcagttcttgctgccaaagcgcatagtctgcatactgcacagcaagaggcgcccattctggagatcgtccgtggcagcgagccgcataagccgtcccaaggtctcgggtcagcggtgttaaggaccagccgtccccgacaatatgatggacgagaagaagcagcacgtactcgtcaggaccgatcacaaaaagctcggcacgaaaagcaggttcagctgcaagatcaaagctgtagcgtacagcttcggcaagccgatcagaaagctccttctcagcaatttcagtaacatgtaactcgggacaggcttgatcagcatctaaaatatgctgataggatgtcccctgtgattcagggaagattgtccgaaggctttcatgacggcagacgaggtcataaagtgccgctttcagcaatccttgatccaactcacctgacaaacggacagcaaccggaatattataagtaggactcggtccttccagacaatgcaggaaccatagccggcgctgggcaaatgagagcgggatcttttcaggccgctcagctctctgcaaagcgggacgtgcactctgcgccaaatcaagatgggcagcgagtccggctactgtcggttcgtcaaagagcttggcgataccaagttcggctcccattacctcgcgaatgcggctcatcagacgggctgcaagaagagaatggcccccaagctcgaagaaactgtcatcgataccgacgcgtgccaaaccgagaacctctgcaaacaagtcacacaatatctcttcctgaggagtccgcggggcccgatcactgacagatgtgctgaagtctggtgccggcagtgctttccggtcaagcttgccattaggtgttaacggcagctcgtccatctccacaaacgccgccggtaccatataatcaggaagactggcccccatataacgacgaagctctgcagtatcaatagcagtatcagcgactacataagccgccaatcgtttgtctcccggctgatcttcccgtacgacaaccgcggcctgttcaatgtgcgggtgattggcaagcacggcatcaatttctccaagttcaattcggaatccgcgaattttgatttgatgatccgcccgcccgatataatccaaagacccatcggcgcgccagcgggcctggtctccggtccgatacatccgagttcccggcggtccgtatggatctgcaacgaagcgctccgccgttaaatcagggcgatggaaataacctctggccaagccggttcctgcaatataaagctctccgacaacgcccggcggcaccggctgcaatccattatcaagcacatacacctgcgtgttccaaatcggtttcccaatcggaggaacgccctgcaacccttcttcaagaaaagctgcggcagaccaaatcgttgtttcagtgggaccgtataagttcgtgactgaacaatgaaggtcttgaagcgcctgcaaaagaccgctcggcagcgcctcgcctcctacaagcactctaagcccccgaagtttctcaggttcactcgttaccaaagcgtgccacagtgtcggtgtcgcctgcatgatgttaatatcgaaattttcaatcatttgagctaatgcctgcggctcacggatcgtttcttttcttgcgatcacaattcgcgctccgctaatcagcggaagatataactccaatgctgaaatatcaaaagcgacagtcgtcacagccaacagcctgtcttcttctcctagagaaaacgcctccttcatggacagcagaaaattgtttaagcttttctgtgtcacaacgactcccttcggtcttcctgttgatcctgaggtatagatgatatacgcaggatggtcaagagaaaccgatacatccggattttccggcgaatagcgttttataatctcctgtgtaacagcctgatcaagcacaagctccggtacagccaggttatcaggcagactggctgctatttcctcagtcgttatgatgcatgaaggtttcgcatcctccagcatgtaagaaatgcggtcggctggaaactccggatcaagtgggagatacgccgcaccagtcttgagcacaccaagcattgagaccaccatctcaggggaacgcggcagcgccaaagcgacaaattgctccggaccaatccctttttcgatcaacagacgcgcgaggcggtttgcctcttcattgagctttcgatagttgacttgaatgtcatcacacatgagagcgatacgttctggcgtaagaactgcctgcttttcgaacatgtcctgaaggctgaccagcttctcggattttgccgtctcattccatttagaaatgactttttctttctcctctggcaacagaagctccatttgcccaatcagcatgtcctctccggcagaagccgtttgcagcagctgcaaaatacgctgctgatgaagcttaatatcagactcactgtatacctcgggattcgcatcaacatcaattcgcagcccgctgccgtctgttctgtcatatacattgattgatagatcatcaacaggaccggctgaaagattatgcgttgtgccccggacgccggcaaagtcgagaccgtaatcaaacggcataagattgatttgagggccaaataatctatgattttctcctatcaatttcagatcgcgccgaagctcttcatggcgatacttatgatgtcgccgaatactgcggatttcccgggaaatttgctgaatcagttcagaaaagctcatcgaagagcttaccgtcagccggagcgggagaaggttcatcaccatagccggtacattcagtgacgcggaccctatccgacccatcatgggcaggccgagcacaacatcctcagagccggtcatacggtgcacataaacagctgacaccgcaatcatgacttcatgccagcttcctgagaaatagcgcgccgcttcttttaacgcgtttacatcagacggaggcagatatgccgtatgacgaagaaaactgttagatgttcttggcgcccgatcagccaagctcacaacttcaggtgcatctgcaaaacggtccagccagaattgacgatccttctcatactgctctgatccgcgataatctgtatcctcctccaaaatggcctggagagacccaaaggaacggcctttagctgtttgtccttttataagcgcagtatatgtacttgccacacgctgggctatcagggaaaaaccgaagccgtcgatcgctatatggtgaatgcgctgataccaaaagaaacgatcaggcccggcaataaacagagcttcattgaacaaagggtcataccctaaatcaaccggctttgctaaatcagctttcatccagtttaatgctgttttttccggatcaggctcagagctgacgtcaatgacgtgcagctgtacatccggagacgggtttatcatctgccaaggcccgtccatattttcaccgaagcggacatgcagcgattccgcttccttgatcacgtgccgcaaagcttcttcaaaaagagcaatattgactggtccattgatttctatatattccgctgtattgtagattggattgtccggatcaagctgctgagcaaaccatatgccagtttgcgccccggtcaaagaatattgaagatcttttgtatcaggcatccgtttgtttaccctccttttataaataatccgcgtttggcagcacttgctggctgcgggttgtgagcaatttttgccattcttcgatcgttgggcgttcagccaattccacgaaagtcacctctgccccttcacggcgccattgttccaccaatgtcatgatccttaccgaatcaagaccacgatcgagcaaatcctcttgatctgtgatgtcttccggtgtttcttgtagaagctcagcaatttgtttacggatattctcacatgtaaacacgttctttttgccagtgtttgctgacgttttttgaacgtctgccggcgcattctgcagctgatcaagaagactgtcagtcatcacggtaaacgcacagcgtccagccgcatagtccagcgccatttgatgtttttctaatgaaaaatcagcaactgcatctcccacaaaaaaggctttaatatcctccataaatgcttcacatgctgtaacaagacagccgatatgggcataaattcctgtaatgatcagctgatcgcgtccctctttgcgcatcatttcaagcagattcgttctcttaaacgcgctgtatctccattttgtcagcacaagatcatcatcctctggtgccagctcggttataattttctcctcataaggaccgctgtttaatcccgggccccaaaagtctgtcagcagcgcacggtcatccggattttggcttcccggctgtgcggtatagacaacaggaatcccaagctgaacacattgattcttcagctttcgtatattcgctgaaagctctattaccggagacgctcccgctgtgaaagcatcgacaaaatagttttgcatatcgtgtattaacaagacagcccgattcggatcaggcacccatgatactttgttttgcggcatatcagatgctgtcggcatttgatacggctgaatggcaggtatagccatatgaacacttcctctcaaattgttgttttatttttttaatcctgcaagaagcttctcggaaatggcttcacggagcgcttttttgctgacttttcctacccctgtctgcggaaaggattcgacaaattcaactcgatcagggattttatatgccgccagtccgcgctctctcaaaaatgctttgagctctgcggcttttggggcttcatcccggggaataatgaacacacaagatctttcgccaagaaattgatcaggcatggagaccattgccgcatcatggacagccggatgcgccagcagatgattttccacctcttcagccgcaaccttttctcctccacggttaatttgatccttcgcccggccttcaacgacaatatacccgtctcgtgtcagcctgacgatatcacccgtacggtaaaaaccgtcctcagtaaatgaagcggcgttatgctcttctgccttatagtaacctcgaattgtatacggtccccgcgtcagcaaatggcctgtttcaccaggttttacgtcgcgatcatgatcatcccaaacacgcacttcatcatatggggacatcggttttccttgggtgttgacaatgatctcctcaggatcatccaatctcgtataattgacgagaccctctgccattccgaacacctgctgcagcgtgcagccgaaaacagcttttaccctgcgcgcggcttcagcactaaacttggcaccgccgacctgcaacacttgaaggctggataaatcgtcacggcgtgaggatgccgcatccatccataccatcgcaagaggcggaacaagagcggttatcgtgaccttttcccgttcaattaaaggaaatgcgtcatctggacttggagaaggagataataccactcttcctccagcgtataatacgccgagaacgccaggtgagctcagcggataattgtgtgccatcggcagcgcggccaagtacaccgtgctgtggtcgagccagcagacctccacactccgcttcaggctgtatatgtagtcatcgtgggtcctcggaatcagtttcgatagcccggtgctcccgccagaaagctggaggaacgccacatctgaagatttgacttcaggcagttttacaggttctgtatgcaaatcctccagcggcaaaaattcctctgcctcacctgcgacaatgatgtttttcaaagtcggcagcttgctttgaacctgtctggcaagcgaacggtagtcaaaaccggaatatgcgtcgggaatgatatatgcagccgcttcagcaaactcgcaaaaatatgtaatttcactgcttcgatgagaaggcagtgcgaagactggaagcgcccccagacggaatagcgcgaaaataacttcaaaaaactctttgatatttggcagctgcaccacaacacgatccttctgttgaatgccgagcttctgaaatccggcagccaggcgatcagcccttgtgtccagctctcgatagctccaatgggtgtttccgcatgtaatggcaatgcgatcaccatatttggctgcccggtcccttaacaaatctccaaacgtctcaccggcccagcagccgttctttcgataggtctcagctaactcatcaggccaaggcgtaaatcctttcagcatgttgtatccctccagcaattcattctgttcatatgtgatccacgcccattgcccgcagcattgtccgaaactttgcggacgtctcctgaagctcgtcctcgggctttgaaccggccacaacaccagctccagcatacaggcggagtgagcgttcttctgcttctgcacaacggatggtcacgatccattctccgtcaccggcatcgtcacaccatccgaccatgccggtaaagaaaccgcggtcaaatggttcaatgctgagaatcgcttctcttgcaagatcagtcggtgttccgcagactgctggcgtcgggtggagagccgctgccaattcaagtgcggttacagacgggtcggaaagctctcccttaatcacgctggacaggtgccacatcgtttccgttttgatcagtgaaggcttctccggaacctccagcgtccggcagaaaggtctcagcgctgccgcaaccgcgtcagcgacaaccgcgtgctcatgaagatcctttgcggaagaaagcaattcagctgcccggcgctggtcttcaacaggatcattactgcgcggccttgagccggctaatgggttggaaacgacctgtgttcccatccttgaaacgagaagctccggacttgctccgagcaatgttcggcggggagacgtttcctcctgactggacacgtctgcggcaaacgtgtagccatgcgagttatgctgagccagatggcgaagcaattcatccgtctgaatcggttcaggcgatgtcaaatgcagcgacctggacagaacgattttgctgagtgttccatcggcaatgcgtgccagcccttgttcaacaccatttttataatcctcaggttcaggaacaggctttatgtgatatgtatgcccagcctgctgttccttttcctcatgatcaaattgaagcggtcctgaccagcgcacttcttcaggtacaacgagccgcgctgcttttacttgatcaaaaggaacggccccgacaacaagcggccggctttgccctgattgttttgcctgacgtaacgcctctgcaattcggccagaaagggtttccatttggttttgcccgtctgcctccggtacgatttcacatatgcctttcgctaacagtacacgatgaggagacgctaagaaaaaggcgcccggctgatattcatgaagcaaatgctccgcttttgtttctgttataacgttttgatccaacattctcatgaacctcctttaaattcagttacacgcctaaggtcgcgccgccatctacgcataaattatgcatcgtaatatgccctgcctggccagaaaccaaaaagagcaccgcatccgcaatatccgaaggcttggctagttttttgagcgggatccctgttttaaatgtctcaagtgatccttttatgacttgctccgctccattctcgtcggcccataatgaccactgcatgtctgtttccgttgatccgggagatacaatgttgcagcgaatattgtattctgcaagctcaaggccaaggcatttcgtaaacatcacagccgcagcctttgaggacgcatatgccgccatagatgttcttggtacaccggcagcattcgatccgactgttacaatcgaacccgatcttcggtccatcatatatttgctgactgaacgcgaggcgttaaatacgccagtcgaattcactgagaacgtcgcctcccattcctcatcgctaagcgaatggatcagtcccgggcgaaggacacccgctacattcactaaaatatcaatcggccccatttcacgttcgatgcgcgccgtgatctcatcaatcgccgcgctgtctctcacatccgcaggaaaagcttctgcatggcggccttctgctttgaggctgctcacaaccttttccagcttttcaggattataatcaaccgccgcaatatgtgcgccttgactagcaagcgtccgcgcaacagcttcgcctattccttgggcagcccctgttataaaagcaatttttccctctatactctttgcattcatatcatcaattcctttcttcgctctaaatgccgaacagacatccagcgaaaaagactgctgcgccttgaaaaacgcaatctattgataatgattatcattatcaattataaaaataatcatatccaaatgtcatgtgacagtcaaatataatttcagtgacaaatatttttttaaaggcaaggctgagtatgtctcagcccattgatagatgcggtccgtcagggtgaagcgcaaaacgcagcgccctgctgaccaaaacaggaagaactgaaatatgtccttctcctgaaaactcgcaaaattctgcccgtatgccttgttcagataaaacggccagccgctcataaagctcccttgcattatcattcatccggcttttatgatgctgctctaattctcctgcggcaagcaggatattgataggctgattgtttttcttggtgagagagacgaaatggtccgttttctcgagaataaacggtttattccaatgaatggacggacttcctgcgatatacgtttgaaacgcatcgggctttgttagcagcacctgcagcacgaaaagccctccgagcgaatggccaaagattgtttgtctttttttatcaatctggtaatctcgttctatctccggttttaaatcctcttcaataaatctgaaaaagccctccgctccgccatgctccggccattctctgccgtcgggcctttccggcagcttcgattgggctgttggcattgtaaaatcccggtggcgtgctgaagagaacggctccgctgtctcatagccaatgccgacgatcactgcagggatcaccccggttttttcgggtcggcgtccctgtattcgaacggcttccgtcatcgttccgaagacagaattggcatccagcagataaatcacaggataaccagtgggtggcggcggcgtactaggtttcgagataaaaatgtgataggtacggttttcattgcgtgaagacatcatacgcacttccgtaccaggaatcgtaaatgcgtttgatgtcccgctatttgtccggtctgttgtttgctctttcatgcagtacgacattcctctccttaaactaaaccgcaatgtatgataatgattttcactatcaactagacacctcaaataataggttttcttccaaagaaagtcaactttttcccgaataaaaaaggcaccttgatcaaataaggtacctgcagactatcaatatggaagtaaaaacctaataaagatgcggattgtcctatttgaaatagaaccttaatcccatgtaaacctttgattttgccaagggtcgcctctcatgtgatagccattccgctcccaaaagccagggtgattttctttcgtaaattggatgccgcgcagccacttggcgcttttccaaaaatatagatgcggaaatacaccccgcagcggaaagccgtgttcaggggttaaaggttcgtcattatgcgcataagccagaagggaagtttccgctaagaaatcatcaagcggcagattggtcgtccagccctcttcagcatgtaaaataacgtagcccgcttcttcttttacacccgctttttccgctatatcacaagcccgcaccccttgccacacattatcaagccttgaccatcccgtgacacaatgaatgtcgttttttgattcataccgtggaaaggctttgacatcttcaaagcttagcagcatcggatggtcaaccaaaccgtatacttgaagattccatttcgtcatatcttcgtaatatgggacatctccggtatgaagcacaggaaatgaagtggtgacgttttgatttggcggcactcttccagattgatcggactgtcttgtttttccgaaatacatatgggcctcctttttgttaacctattttaaaatcatgttgacaatctttttgttctttattactctatgattgtgtatgtcaacctaagggggaacaacgatgaaacaacgtaaacttcgtgcgggagatatggcgctgattggcatgttcgccgcacttatggctgtcggggccaacattacatcagtagcaccctttttacaagtagccggcattccgctttcgatgcagccgtttttctgtctcttggcagctttgcttcttggcagcaaacgagcagcgattgccatgattgtatatgcacttgtgggattggccggagcgcctgtgtttgctcaattttcagcaggcttcgcaccgtttgcagggaaaagcggcgggtttattatctcatacattccggcagcatttgtagcgggatggtttttagaacgaaacattcagccaagtaaaattcgatttctcattgcttcacttatcggaacggcgatcatgtatctcatcggcactacctatatgtatcttgcactgaagctgtggattcatacgccagtgagctacggcacggcttggggctttatgatttggtttatggtaaaagatacagcgctggctgtgatactgtcgtttatcgcaccagcaatctaccgctctattcataaagcaaccggctttaacagaaatcacatatcatctacgtaaaaaccgttctattggacggttttttatcataacgagaaaaggctccccagtaaaggggagcctttttcctataaaacaagcgctgcaatccagccaaagatgacaagcggaatattataaaatataaatgtcggcacacaagtatcccaaatgtggtgatgctggccgtccgcactcaaacctgaagtcggcccaagcgtactgtcactggcaggtgaaccggcatcgccaagcgcagcagcagccccgataatcgcaatcgttgccatcgggctgaatccaagctgcatgcatagaggcacgaaaatggttgtgataacaggaatggtcgcaaaagaagatccgatccccattgtaattaataagccgacaatgagcatcagcaatgcgcccaaggactgactgtgtccgataaaaccagctgacgttttgaccagtgactcgacatctccggttttcgtcaatacgtttgaaaatccggctgcaacaagcatgacaaagccgataaaggccattaaaaccattccatcagtaatcagtgagtccgcttcatcacgcttcatcacaccgctgacaaacagaacaatcagaccagcgagcgcccccataatcattccttctactcccaaagtctgagataagtaaagctggacgccgagtgacacaacaatggctagaaccgcgataccaatgctttttctcgtatatggcgatgcttctgcacctgaaatgtcttttgtttcatattgtttcggtttacggtatacgatcactgataaaataaggccgacaaccatacctgcaactggaataatcagtgcgtacggaatatcagcaagcggaacgtttaacccggcatccgccatattgtccttcagcatgccttggaagatttggccgaaacccaccggaagcaaaatataaggagccgttaagccaaatgtaattacacacgcgatcagacggcggtccatttcaagttcattaaagattttcaaaagcggcggaatcagcaccgggataaacgcgatgtgaaccggaacgacgttttgcgaaaaacaagatacaattaaaataatcagcacaatcagcaccttagaaagtgctttttttcgagaatcttccttatttccgattaatttaacggaggcttccaccattgcgtccggaagacctgttttcgtcaaagcggcggcaaacgcgccaagcatggcatagctgactgcaacggtggcatttccgccgagaccgtctgtaaaagctttaaccgtttcgccaagaccgagcccgcctgttaacccgccggccaaggcgcctataattaatgcgataacaatattgacacgcagcaggcttaatacaagcataagcaggactgcgatgacgactgcattcatgatgatacccctccaaaaatcctttagtttgctaatgtagtagataaataaagtacgaacgtatcgtatcataaccgatccactttagtcaactaaagatttcggaagaaaaaatccctgccgcatcatacagcagggatttttcattactcgtttttatcttcttccaatgtaaatcgctccgcaagtgtagccagtgttcttgccataacgccagtagccccggccggcccgaagcaggttgctttattggcagtcgctgttcctgcaatatcaaggtgaacccaaggtgttgactcagcgaattcaccaagaaacgttcctgccataatcgcatgtccctcgcgtcccggtgaattgttgagatccgccatttggctgcttttcacgcgttttttatccttctctgttatcggcagctgccagattgcctcgccgcactcttgtgcagcatcagctacctgctggtaaaagctttgatcatttgtcattgcaccggttgtttcagttcctaatgccacaacgacgccgccggtaagcgtagctacatcgacaagaactgacgcgccatgctgtttcgcgtatgtaatgccatctgcaagcactagccttccttcagcatccgtattaaggatttctattgtttttccgcttaaagatacgatcacgtcatccggcttcatggccccgccggagatcatattatcggttgatggaataacgcacagcacgttttgctcaggacgaagctctccgatcgtttccatagcaccgagaaccgcagctgctcctcccatatctgatttcatgccgacaattccagatttcgttttaatggagtagccgcctgtgtcaaaggtaattcctttcccgactagtccgacgacgtcctcccattcctttttgccctgatatttcaacacaatcattttcggcggttcggtggagccttggtttaccgcaagtattccgcccataccgagctcttccatctctgatttctccaatatctcacactcaaaatcatatttcgccgcaagctcttcagcatacgaagcgaggtcagtcgctgtcagcatgtttcccggcatattcacaagcgttctagccgaatttgtcccttgtccgtatgcctggccgacgcgaagcccggcctgcacttcctgtgtatcttcatctgttacaacatacacggcttcaatttgtttgtcaggctcatttgatttgtgcttataatcctgcacctcataggaagcaagcaggcagctctcagctaaagcatgagcggcatcggctggaggcacgtcttccgaaataaacgtatcaagcaggacagcagtttcttgttttcgatctttatgaatggcttgaaaaacatgagcaaaacgttccttcgcctgttcaaacgaataattagcttctctccccagaccaacgaaataaatccgtttcatacccgcagaagatggagggaatacttttgatacttgattcggtttcgcagagacatcaccctcttttaaaagctgtgtcagatggccttcgagcatttcatcaatttccaacgcttttcctgtcagctggcttttttgaaaaagcccgaccacaagggtttctgtatgctctgattgttgaaccgcataaaacatgaggcttacactcctaacgtaatgggtatttgtaatgaacaatggtataataggaaaaacattctttccactatacttattttaacaaacaacagtctaagacttgcttttttcttttgaaacacgaaggatttttcaaatagaaaggatgtcgccgatggaacttttaacgaattttcctttattatcaagcctggccgcaattatttttgctcaggtcatcaaagtgcccatacagtttatcgtgtccagaaaactggactggtcgctggtcacaagcacaggcggcatgccgagctctcactccgcagcggtcactgcgctttctacaggcgtagccttggagcatggattagactcctcactctttgcggtttccgccattttcgccgtcataaccatgtttgacgcaactggcgtcagacgccacgccggtgagcaggcaacagtcattaataagcttgttattgattttaaccgtttcgtaaatgaagcgaaggacttccctaaggctgcagagaaagaaaagcaaaaaaagctgaaagagcttctcggacatcagccgatcgaagtctttttcggaggcctaacaggtattttactgacattggtactcgcttactttttcatgtaaaaaaacgctcctgctttcgctggagcgttttattctttcacagttttatattgatttctgaacacttgcaaagattttgtttcattgagcttctcaagctcatcctcggtaatctttcccattccctttttaatcacatatacatcaagggtttttttgccccattcattgtatacatctttgactgtctcaaagtacagatcaaggcggtttcccttaatagctgatcctgtgtcggccacaactccgagaccgtagttcggaatgaataaaattgttccgatcgggaaaacggacgggtcagcagcaaccgtggaatataaatcccgtttcactttcacacctgaatatgtaagcccgtataatggatcaccgggatttttgcccgtcgactcagctcctgctgtgtagcctgttgctgttactctttggactggatattcatcccaatcaaatgcctcttctaacggttttgttttatcctcagccgcggacgtggtttgtgtttgtttctgctgcaatgcttttaatgtcagtcctgcatgcttcaagtgcttttcctgatgttcctgcacccattttgacaagtccttcgcttcaattcctgacactgataaaaatgtcgtgccaaatgcaagcagaaataaacaggtcatcagcaaacgtctgatcatattcaacatcattcacctctcctccgaatcattgttcccaagtggagagagcattattcaaaatggtgaatgagctgaacgcataaaaaaagctttctttagaagaaagcggcatttaaaacatttgatatcctctttttctgagcatgttgatcgctataccggacacgatggcgccggccaaaccgctggctaaaatcagcacatcggcagccgctaatgataagacacgatgaaacagactggcaaaggattctcccggcgactggacatagctgatcagcttttctttgctgataatgaaaaggcatacaatcggataaatcacagccataatccaagacattctcagcagcatgtttaataagaaaccgattccaaaaaacaagacaaaaaacaaaacaattgagatgattacgactggcagactaatcaacctattccaccccctgcgttgtttttagtgtaacgcgggggctgaaataaagtcaacggctggaaaaagaatgactgtcttttcctgtcccctggcaagacggacaagtctctgaaccgccgagaatcaattgaaaatatcctttccctgaacaaaatgggcatgcatgtgaagcggttgtcgttgcagttttcatctaatcatcacccttttttctcaattttctgataatataccatatcaagctgtcaacaataaagtcagatcatgtgacaaatcttttgatgtaagcggaaacatacttgttttcctctcgttctctttttattttggcgttttttaataaagaaaacccgcttccgcgggtttttagaaaaacttgaacttgccttttttcaatgtcagtccgagtccgccaatcataaacagcgagcggttatcaatgacttttttcataaacgaagcgggcgtgcctttcagctttctgccataaacaaccccaaccgcgttatgctcgccaagagaagccactgttcccttaatgtccggcttgaattcctcaagctctccgcctttaataagcctgccaaggtttttagcgaccgttatgccctgctgcattgcaatttgcgcagtaggcggatacggacgctctgtatcttcattcataaacagcgagctgtcgccgagaataaagacattgtcatgtcccggggcgcgaagatcagggttgactttcacccggccgcgcatattttcaaaaccggcttcctccacaatcggatggccgcggacacctgccgcccaaacaacggtttgcgatttgatctgctctggttcctcatcttttttgccgactctgactccttccggggtacattcttgtacagccgtgccgatcttgaactcaactccgttttcctcaagataatgtacggcgtaatcaacaagttccggatcaaagcccggcaaaacggtcggcgctgcttccacacaaatgatgcggacaaggcttctgtcaacgtcatattccttacagagctccggcacgcgagcagccagttcgccaagaaattcaattcccgtaaatccggcaccgccaacaacgatcgttaacctgtccggccgtttttccgcttccgtattgtaagtcgcaaactgcagctcaatatgttcccgcagcaggcgcgacgtgttgatgttggcaatcggaaacgcatattcttttaagcctttaatgccgaacgtttcaggcacggcgccgagcccgatgactaaataatcgtactgcagttctccattcgcaagcacaacttttttctcatcaattttgattgcctttacggtatcctgtacaaaattcacccgtgactggttgattacatcttttatctgataacggcagcggtcatgatggagcgtacccgcgctcgcttcatgcatccatgtcgtttcataatgataattgtgtttatttacaagcgtaatgtcagcatcattcggcccgacatacttcgtcagccttgtcaccgtcatcaatccgccatatcctgcacctaaaatcacgattttgggcttattcaatgccatcacatccaccttctctttttttgcttttgttagacccataataaaatcatcatttgtgttagcttcagcttattggcgggattttatgaaatatattgaaaagttttttgtgaagtccttacccgtagcactattatcatgtttatccggctggcccaagaaacattcagaaaaagatcatttcatttggttattatcgtagcggcctgcggaaatattttcaagaacggatgggcacgttagatccttacgattttttctgctgactcgtcaatttgaacggcaatatggtataattaataacaattttcatttaggaggcaattttcgtatgcgagaggatacaaaggtttatgatattacaattataggcgggggaccggtcggcttattcaccgctttttacggcgggatgagacaggcaagcgtcaaaattatcgaaagcctgcctcagctcggcggacagcttagcgccctataccctgagaagtatatatatgatgtagcgggattcccgaaaatccgtgcgcaagagcttatcaataacttaaaagagcaaatggcgaaattcgaccaaaccatttgtctggagcaagcggttgaatctgttgagaaacaagcggacggcgtgtttaagcttgtaacaaatgaagaaacccactactctaaaacggtcatcatcactgcaggaaacggcgcattcaaaccgagaaagctggaacttgaaaatgccgagcagtatgaaggcaaaaacctccattacttcgttgatgatctgcaaaaattcgccggcagacgcgttgcgatccttggcggtggagattccgcggttgattgggcgcttatgcttgagccaatcgcaaaagaagtatcgatcatacaccgccgcgacaagttccgtgcgcacgagcacagtgtggaaaaccttcatgcgtcgaaggttaatgtcctgacaccattcgtccctgcggagctgatcggcgaagacaaaatcgaacagctagtgcttgaagaagtgaaaggcgaccgcaaagagattttagaaattgatgacttaatcgtcaactacggtttcgtttcatctcttggaccgatcaaaaactggggcctggacatcgagaaaaattccattgtcgtgaaatcaacaatggaaacaaatatcgaaggcttctttgcagcaggtgacatttgtacatacgaaggaaaagtcaacctgattgccagcggcttcggtgaggcaccgacagcagtgaacaacgccaaggcttacatggacccgaaagcccgcgtacagcctcttcattcaacaagtctttttgaaaataaataaaaaaaaggagcttgtgtctgcgacacagctccttttttatttgaagatatttatataattcaatgcagttcctacaaccagcgcaatcacaagggctgcgactacccagatcattgccataataatgcggtcctgaatcttttgggacttcggtgttttttcttcgttttgggccatcttattcgctcctttcctatgtccatgccataaagaaagcctggtgctgaacgaccaagctttgctgaacgtatatcattcgcgttttgatccgctctctaagaccattcgttaaaactatgatacctaaactcaccctgcatgacaagcttcggcacttgcaccacacctgccagcaaatcataatgtttgacatcctaaataaaacagagtacattatagaaggcgaacatttcatatattatacttttaaatattcgtttttaggagtgaaaaccatggaaaacgtatttgattacgaagatattcagctaattcctgcaaaatgcattgtgaatagccgttcagaatgtgatacatccgtacgtttaggcggacgtacatttaaattgcccgtcgtccctgccaatatgcagacgattatagatgagaagctagcgattcaattagccgaaaatggctacttttatgtcatgcaccgatttgagcctgagacacgaattgattttattaaagatatgaacgcacgcgggttattctcttctatcagcgtgggcgtcaaagatgaggagtatgaatttgtccgccagctggcagaagaaaatctgactcctgaatacgtgacaattgacattgctcacgggcactcaaatgctgtcattgaaatgatccagcaccttaaaaaacatttgccggacagctttgttattgctggcaatgtcggaacgccggaagcggtcagagagcttgaaaatgcgggagcggatgccactaaagtcggcatcggaccgggaaaagtatgtattacgaaaatcaaaaccggcttcggcacaggcggctggcaattagcggcgctgcgctggtgtgccaaggctgccagcaaaccgattatcgcggatggcggcatccgcacccatggcgacatcgcaaaatcaatccgattcggcgcaacgatggtcatgatcggttcactatttgccggacacgaagagtcgccaggccaaacgatcgaaaaagacggaaagctttacaaggagtacttcggctcagcctctgaattccaaaaaggcgaaaagaaaaatgtcgaaggcaaaaaaatgcacgtggcgcataaaggctcaatcaaggatacactgattgaaatggagcaggatcttcaatcttctatttcttatgcaggcggaacaaaacttgacgccatccgcaacgtggattatgtgattgtgaagaattccatttttaatggggataagtactaatatgcgaaaagcacccggatttgggtgctttttatgtgtaaaaaaatgttatatggtatattttagtaataaaaaatccttgtttctacattctttcttatcgtatcttagcgtcccccaaaagcttgtccaattaaacttgaaacatcctcctcggccagttcgatttctagtcggtgttaataaatacatgacatcaaattttgaaataagtaactccatttttataatttttccagtagtttcgtaaaacccacctagactccatacctcctattaagaaaaagttatttcattttccaaattatacatttataaacttgtcttcttttccactcgattctttagccatctatatacatttgctatattaatttcaaaaccttttccctctaattttgttagagccactgctcctccaaatacctcttccttatcttcctcttctgatagagcttttgttaccagagaagcttgaagtattgttgaatcaattatcctttgttgttgctcaaccaaagtttgaagttgttcaattgtttgagtttgcaactgcactgttgcatttaaaaatattatctgactcttaaaatgctggacgttagccattaattgctgaatttgaaggtcacttgagaagttcgtatatccaatatcatttaccattgatggtagctgcaaataaatttctaatgcttcttgtataatgtttaaagcttcatctgttgattctggaattactgtaaaaagtacattatttgcttgatgcgtaatttctgtagttgctttaatacctatattctttaagaattccgaaaaataaataagatattgttcacatgcaacacgaacatgttcagggaattcaaagatactagttagagtaccttccctattttttaaaatcaactgatttattgcttctcttgttacattgttagcgatacgtaaatattcttctaaacaattattagaattattattacaaataaactttaaggaataaccatatatatcagattcaatggtaatatccatccgttttgcgacatcattagcttcatatattaattcttctgtactaaaaatatttttccatttttcagtttcccaagaaaaatcaattaatatttcaaacattttatcatcaggtgaaaaaataaaaaatatactttgtttcaaaccagtaatatccaattcagttgggatttctattgttactgattttttatattcatttgcaagttggatcttattaaatggcatactggttatacttgaaacaacttcatttgcaatgacttcaaaaataatctcaattttataagtgaagagtttcaccttttctggttccatgatttgtttattaatttctaaaaaaggctcacccttataatctttaattataatcattatcttctcctcctttcagacttactttcatcgctcctttagcgctctatatatagtcgtttgcttatattatttaaactgtattaagcttattctcccttttattcctactaccgaataagtctaagggcatgttgattttcttttagtatatttcccctgtctttatttgtaaactcctctcttcttaacttcttcaattcatttgggtgcatcatatttaagataattggcataatcctaaaaattcaggagaataagtcgtttacatttcaatctcgtagtgtttgtgaagccaagtaacaaggagctccaattttactctcttaaggtttcctgtctcaagccttttgcatttttacctgccataactacgccaatttcttattccatagttgatttgtaatattaatttttggctgttttcttcctaactcttatttaataagaaaacttctagatatttatgtgattgacattaaatccagaaggattgtaattcacaattcttattatattttgcgcactaaacctcagaattcctcaggcccacctacatttgttgctttcttgaacaaagaatcgcagacgcagacgaccagtttacgatagatgaaaatacgaccatagcaaggtttatatacgatatgcacaagtattggtgttcgctatcctgccgccgaagtattcccctaactttacctaggttacatacactttaaagtacaattttcacaatatgaaatctctatcccgctctttaattctttctaaaaagaaatacttatatatttttcaatgcttttccattattcttgccatttgttttgcatttggattttcttcattttgcaactgttcaatgatgttcatataatccgtttcatttcggttctggcttaatttatatgccgcttgaatgtcttccaccttaatcttaaatccaacgatacctttcaattcacgttctaagagttttggagaaagcttatcccataaaacaggattgtcacgatgtttttcgtatttctccagcatgattgttaattcttctgctaattcatctttctctaacatacttgcttttccatacatgtggacagcctgataattccacgtcggaacattttcgcgcgaataccaggaagaagaaatataagcgtgcggtccctgaaacatcacaagcacatcttcacaggcttcaaacgttctccactgaggatttccataagcgaaatgccccgtaatatagtaatgatcatcttttttattgaatcctaacggcaaatgtgtggcaattggttttccttgttctgttgtgacaaccgtaccaaaggagttttcttgtacaaaattccaaatttcttcagcatttgtgactttaaaatattttggaatatacatcatcatccacccttcgaaaaatattatatgagtgttttagccatgattaaatccgtttgttcttcatcacccatataaaaagagtgggcgccggtctgaacaaaccccattttcttataaaaggcaatagcattttcatttttttcccacacacctagccaaatgttctttttattacgttccagcgcaatttctatcgctttattcagcagatgtttgccaagcccatttttttgaaagctgttctttatataaattctctcgatttcaagtgattcagcacccatttcttcagactgagcatcatcgatattgacctttacatatccagcgatttcatgatcaaagtaaataaaaaagaattgcgaagacatattggataactctttttccagctgctcagtgttaaatgcactttctaaataggctttcatattttcaggtgagttctgttctttaaaagtgtcattgaatgtttcaatactcaattgttgaagtgtttgtaaatcttcccggctgcattttttcatttttacactcattgttcggattcagcccctttatttaaaattcaattgtcttgtgtccctttttaatatatttaaacacggaacagatactgaccttgttaccattccaaaaatcttcttcatcatcaactccctatcgtgattttgttgcaaatgcaataaaatataccccgcattaaatatagcgtaactttgctgtatttacaacaaaaatcaaacaacaaatcagcgtttctcttgccgaagtccccggtactctctgcatcatttccccataataaaaacgcctcccttaacgatgatttatcgctaagaaaagcgtcagtaatagttgctatccgtttttagtgcttagcactcttcaggcttgcctgcattcgttgctgttctgaacgaagaaccgcagccgcatgaagcgatggcgtttggattgtcgatggtgaagccgccgccgagcatggattgtttataatcaatcacggtgccgttcatgatgtcaaggctttctttgtcaactagaacagtgatgccgtgctgatcaaacacactgtctgattcactcttttcatgctcaaagcccatgccgtaagaaagtccgctgcagccgccgcctttgacgcctacacgtagaaacgcgttttcttcttcatgctctttcatcatatcttttatatgcaaagctgctgcttctgtaattgttaccgggttgctcatcattgtgaacctccttttaaaaaccggttgctgtcttttattataaacatgatcgtcccaattctcaaacaaggtgttttacaagaaatagacaccctcacaaacggtttcagccggccctgtcatcattacatggccgttatctttccagtttatcaccaaatccccgcctgctaaatgcaccgtgatgtcttgatttcgctttgatacgccgtttaatacagatgcgactgccgctgcacatgctcctgtcccgcatgcctgagtaatccctgatccccgttcccagacgcggaaatgcaattcttgttcattcacggtttcaacgaattccacattgatgccttccggaaatctcggatctttctcaatcaccggccccagtgtcgttaagggtgcctgttcaatgtctgcgatcggaaaaacgatatgcggatttcccattgaaacggcagtgcctgttagttctacttcaccaaatgccatcgtttcattgattgtgtgctcttccccgccgtcaagcatcgggagctcggattttgtcaagcgcggttcgcccatatcgacagtgaccacattcacttttccgttttcgacttgaacctccgctttcacaagcccggagagagtttcaatcagaaaagatgtttcctcaaccagcttatgctcatatgcgtattttgcgacgcagcgcaggccgttgccgcagtttttcccttcagatccgtcattattaaaaatccgcattttaacaggcgcttggtctgatgggcatatcaggatcattccgtcggatccgatccctgtataaacagaagaaacctgaattgcaatctctgacagtttttcttctggaagctgttcttcaaattgattcacataaatataactgtttcccaggccgtgcattttggtaaatcgaaatgagttcataggtgcctccaactttttttctttttcttagtataaaagctattataagcggacacaatacaattatcccccgtttttcatacataaaagctccttgcactgacgcaaggagcttttatcgtttatataaacatgccggcaatggctgcgctgagcagattggctaatgttcctgcaagaacagccttcaggccgagacgcgcgatatctgaacggcggctgggtgctaatccgcccagcgtaccaagcataatcgcaattgatgaaaaattggcgaatccgcataacgcgaaactgataatggtagcagttttcttagaaaactcgccgatgtgcggaccgaagttagaataagcgacaaactcattcagcaccaatttctggccgatatagcttcccgcctgcaatgcttcatgccaaggcacgccaatcaaaaaggcgataggagaaaacacataaccgagaatggattctaatgttacgccttttaaaccgaacaagccgaaagccccgccgagaataccgtttactacagcgattaacgcaacaaacgcaagcagcatcgccccaacgtttaacgcaatttgcagtcctgttgacgctccctttgcagctgcgtcaatgacattggctgcgccttcgccttcatccattttgaaatcgctttttacggtttgcgttttttccgtttcgggtataatcaatttaccaaagactagtccagctggagcagccataaagctggccgccagcaaatattcaatcggaataccaagaagcgcgtacccaaacaaggtagatcccgcaactgccgatagaccgctcgtcataatcgtaaacaactcagagcgcgtcagcccggcaatcaggggtttgatcactaacggagattctgattgtcctacaaaaatattggcagcagccgccagagattccgttttgcttgttccaaggagcttcgacaatccgccgccaatgacacggaaaacgagctgcatgattttcaaatgatataaaactgcaatcagtgctgagaagaaaatgataacgggcagtacacttaatgcaaaggccggactgtctccgacctttagaagcggtccaaaaataaaactgatgccttcattcgcatagtcaatcagaagctgtacacggcttgaaaaccataaaaaaacagcgcgtcccgcttcccatttcaacacgatgtatccaaacgccacctgtgtgcataaaccaacgatgacggttcttatcttaatattgcttttcttttctgaaaataaaaacgcgatagcaatgatcgcaactgcgcccagcagcccccacagaacattcatgaatactcgtacacctcttaaattttatttaaaaaaatatcttttatacgataacaataatattttttgatgtctacacatttttttagttcttttgtacagcaaaataaaaaagggcctgtccaggcccttttctttaaaacattggattttcttcaataaaggtatatatattctcaacaagctcagcaggcgtttcacccatgacgacttctccgtttaccagagcgaaaagcgattccatgcatgtcccgcagtagcttaagcagccatattcaaggacatcaaggttgggatccttctccaaaatcgcccgggcttcctgagagccgtgagccagattgctgacacaaaattcaatcattggattcatgcggtttcacctcacatatgtccattatcgcgaatttttcactattcgtcaaagacaacggatgattcaaaatttattatcgtaacatattatttctcaaataacgttttactaatttgtgttttcaggctaaattgtaggttattttgaaactattattgtgattttagatcaaattcgatataattctagatgttattttacatagttcgtattttcttcaatgtatctatcatactcttcggattaaaggggaattcaaatgaaaaaattggtcttgatcggcggaggttacgggaacatgcgtgttcttcatcgcttattgccaaaccagctgcctgatgatgtttcaatcacgttaattgacagaaatccttatcactgcttgaaaacagaatattatgcccttgccgcaggcacaatttctgaccatcatatcagagtgtcattcccagagcaccctcgcctggatgtccaatacggtgatatcacatcaattgatattgtacaaaaacaagtgctgttccaagatcgtgaaccgatttcttacgatgacgccgtaatcgggctcggctgtgaggataaatatcacaacgtgccgggagcgcctgaattcacctacagtattcaaaccatcgatcagtcccgcgaaacctaccaaaagctgaataatctgagcgctaatgccaccgtcgccattgtcggagcgggcttaagcggcgttgagcttgcaagtgaattgagagaaagccgtgatgacctgaacattattttgttcgaccgcggtaatctcattttatcaagctttcccgagcgtttaagcaaatatgtgcaaaaatggttcgaagagcacggtgtccgcattattaacagggcaaatatcacaaaagtagaagaaggcgttgtgtataaccacgatgatccgatttctgcagacgccatcgtgtggacagccggcatccagccaaacaaagtcgtcagagacttagatgtggagaaggacgcacaagggcgtattgtattaacgcctcatcacaatcttccaggtgatgaacatctgtacgttgtcggcgattgcgccagccttcctcatgcaccgagcgcccagctggcagaggctcaagcagagcagattgtccaaatcttgcaaaaacgctggaatggagaagccctgcctgaatcaatgccgcagtttaagctgaaaggcgtcctcggttcactcggaaaaaaagccggcttcgggcttgttgctgaccgtccgctgatcggccgtgttccgcgtatgctgaaatccggcttgctgtggatgtataaacaccataacggttaatgatagagaagaaccgctgatcaagtcagcggttttctgtatacccatgcttctccatttcctcataaacgtcttttaattttggattgccttcaccgacaattttgtcttctacgagcacaagcggataaaaatactcgtcatttctgattttttccgcaagctctttcgcatgttcattgtcaggcggctcatgaatatcgatgtactgcatctcaaaaggctgatttggatattttcttttcagcgcagcctcaagccactcgtatgtatccttggctgtcggcatattgacacagctcgcacaaacggtttctgccccgtacacgcttagaatgactggtttcatcacttgtagacgcccccttctcctatgtaagtcctttcttttaagtatacagagccaaagggcgtttttatagaaaaaaaccgtttttgtgttgaagtctgaatgtgctataatagggagagcaactttgcaaaccaaacaatagatttttattgttacactgaatataatggttttatgacgacgaaaggagcgaatgtcatgactgaagttgaaatgaaagaacaggtgcaggaagtactggacaaacttcgtccgtttttacttcgtgacggcggtgactgtgagcttgtagacgtagatgaaggtatcgttaagcttcgtcttctaggcgcatgcggcagctgcccaagttcaacaattacgctgaaagccggaattgagcgcgctcttctagaagaagtgccgggtgtcgttgaagtagaacaagtcttttaataaagcagccaggctgatatttgatcagcctggctttttttattagagatattggtcaaaccatgagctgatataattcaggcgcttgatccgctgtcttgggtgtccggtgcgtgacaaattgtgcgatgcattcggaaaacggacaagcttggtttccttgcccatttttttcagagcgataaacagctgctccgcctgctcgatcggacatcggtcatcccgctcgccatgcagtatcaaaagcggtgtctccacgtttgctgcgtattttaaaggagaccggtcccagagcttttctgtgtcctcaaacatgtcatgctcaagctgccagtctgtaaagaaatagccgatatcactgacgccgtgaaagctgatccaatttgatatcgagcgctgggtaacggcagctttaaagcggttcgtctgcccgacgatccagttggtcataaaacctccgtagcttccgcccgtgacaccgagccgcttaggatcaatatgcggatctcgtttgatagcctcatccacagcctgcatcacatcgtcataatcctttcccccataatctcctctgaccgcattcacaaattcctgcccgtagccgtggcttcctctcggattgatataaacgaccgcgtatcctttcgccgccagcacctgaaactcatgaaaatatgtatgtccgtacatcatatgcggaccgccgtgtatgttaagaataagtggatatgttgtctcaccttccatttgtgcaggcctcatcagccagccgttcaccatcacgccgtcttctgtagcatattgaatctcttcaggtattgatatcgtatgctccctgacaaacttgtcattcgcgccagtcagctgtttctcttcctgtccaagcgggatactgtaaagctcactcggtctgtccggctttgtcacactggcaataaagtgctgttcatcaggtgaaagagaaaagctattgatgtactctttttccagacgaatcggatacacaaggccttcaatcgaaatataatagatgcccgtactgccttgatctgtgccgatgacataaaacccttggctgtcctttgtccaaatcgggcgctgttcagcaccaccgatcaatgaatctccaatcagcgcatccgctaaatgaacgtccagcatctcagtaagacatgtgaggcggccttgttcgatatcatagagccacgcctttgagagcgtagcattcttatattccttttcatttccaagcaaagcaagataccttccgtctggtgaaaatgagcttgatccgaatgagccgcgatgaggtgtaacctgcttaagatctccagactccagtgacattatgtaaacatcatgcggcttgctggcatcatctgtttcagttaaattagctgagaaaacaagccatttgccgtcaggagaaaaagcaggatcaccatgatcagctttgtgacttgtcagctcttccatctcacccgactttacgctgacaagcacaagctgggcatacgcacctctcgtcagccctttgccgtcccgtttgtaggagaggccttgcacttcaacaggttcatagctgtcctgctctgttttttctcggtcatcaatgttttctccctctcccaaactgacagtgaccagaatcgattcgccatccggggaccatattggctttgacacgccatacgggatatcagtcagttttctcgcttctccgccttcagcgctcatcatatacagctgtgccgcatcgccttctcgatcagaaataaaggcaagcgtgcacccgtccggagaccatcttgggtcggtgcttcgcttttctccatgtgtccaaggaacagacccgcccgttttcgtttcatagatccatatatttgatgtatacgaatctttctcttgattcacttgtgattttacatatgcggcacgggtgccgtctggggcgtattgaggatcggtcacagagacaatcgctgtgatgtcgtctgcggttatcagctttttcatattcatctcctcctttttacatgtatttcgtttttctaaataaaaactcctttatctccagcaaaaaaagcgccctctgctgacgctgaggaacgcttggcatgatctatacactttttacttgatataaaggatttcgctctattatacttccctctttcgggacggtcaaagcgtctacttcacaatgagggaaatgaagcgcgagctgttcttttagctcttctccctttcctttttcggtcatgacgagaatcgtcgggcctgctccgctgagagccgttccatatgcgcccttcatctcggcgacgtgctctacttttgacagctcaggcacaagcatcgcccggtacggctgatggaacatatccttcttcatgattttcccgacaagcggccaatccttggacatgatcgcagcaatgagtatattgctgacagcacttgcttttacggcgtcggcatatggaaactccttcggaagcacgtctctcgcgtctcttgtcagcacttcgtaaaaaggaatgacaacgactacgtcaatgtcagcattcgggacgcggatcatttgggtctcgtcatcctcatgcaggccgatcacaagtccgccgacgagagaagcgccagcattgtccgggtgtccttcttctagactggctaaatgcagcttgtccgcttcagacagctttaagccgcataattcatcagccagttcaatggccgctacaatcgccgcggcgctgctgccaaggccgcgtgcaagcgggatgtcgctccacaccttcacatggacaggaggtatttcttttccgtacaaatctgcggtccgtttagccacttgatagatcaggttatctgtacccgccggaattccggcgactgtttctgtttcagcctcaaaagaccatttgtcgctttcaaagacggtcagcttcaaatatctgctgagcgccattccgactgaatcaaagccggggcctaggttagctgtgcttccgggaacagtgacagagaacagcatgtcggcttcgttcatacacgggccgctccttttacatattcaaggatgctgtcttcatcagtcggcaatgtgacaggcttgatttctgaaatgtcgaccgctgtgttcggatctttcagtccgtttcctgttaacacagctacgaccttgctgcctttcggaatttctccggatttcacctgtttcagcactcctgcgatagacgcgcaagaacccggttctgcaaacacgccttctacacgggcgatcagctgatatgcgtgaaggatttcatcatcagtgacttcgtcaattttcccattggattcctcggctgcctttacagctttgtcccagcttgccgggtttccgatacgaatggctgtcgctattgtttcaggattttcaatcacttcattgcgcacgattgccgccgcaccctcagcttcaaagccacgcattttcggaaggcctgtgccgtttttctcatgatattccttgaagcccttccagtacgcagtgatgtttcccgcgtttccgaccgggatcgctaaaacatcaggcgcttcccccagctgttcgcacacttcgaaggcagcagttttttggccttcaatgcggtaagggttgactgagttgacaagggcaatcggtgatttctcacagatggaacggacaattttaagcgcatcgtcaaagtttccgtcaattgcgataatctcggctccgtacatgacagcttgagcgagttttccaaatgcaatttttccgttcgggatgatgacaatgcatttcatgttagcacgggctgcatatgctgccgcagcagcggaagtgttacctgttgacgcgcacataatcgtgtcattgccttcttcttttgcctttgccacagccataaccattccgcgatctttaaatgatcccgtaggattgacgccttccgttttgacatgaagctcaattccgagctgctcagacagcttcggcaggtgaataagaggtgtgtttccttcatgtaaagttagcgccggtgtttgatctgttacaggtaaaaattctttatattgatggataagtcctttccacattagctccaaccgttcccttctacacgatatgtgcttttgacttcttgaacgacttccaaatcatttaggttttgcaggatatcactgaaatcagcttctgatgtatgatgtgtgacaattacgatttcagctaactcatcatggcctttaattggcagctgaaggattttttcaaagctcacgccccgctctgagaacacagatgtaattttcgagaatgaaccaacctcatcttttacatgaattcttaaaaactgctgtgcataaatgtcagacggcgatttcatgtttttctcatattgcggtccgacaaagctgttgccggttacacctaggcgcatatttttcatgacagcgacgaggtcagaaacaacggatgtcgctgtcggcatgcttccggctcccggcccgtagaacatcgtctcaccgacagcctcgccgtatacataaacagcgttaaactcattatgaacagcagaaagcggatggtggtcaggaagcagtgtcggctgtacgctgacctcgattttgctgccgtcacgctgagcaatcccgatcagcttcattgtatagccgaggcgtttgctgaagctgatgtcctcgtctgtaatttgggagatcccctttactttgacgtcttccagatccacgttcatcgagaagccgaggcgcgccaatatcgccattttccgtgcggcgtcaagcccttccacgtcagaagtcggatcagcttcggcaaaaccgagatcctgcgcttccttgagcacttcctcatatgggcttttctctttgatcatttttgttaagataaagtttgttgtgccgttcacaattcccatcatttttgtaattcgatctgatgagaggccttcctctaatgtgcgcagaatcggaatcccgccggcaacactggcttcaaagtagatatcgcatccattttccttcgcttcagcaagcagctcggagccgtacacagccattaagtccttgtttgctgtgacaacatgctttttcgatctcagcgcgtcgaccaaatattgttttgtctgttcaacgccgccgatcacctcgatgacgacatcaacatctggatcatcaatgacatcatacacttctgtcgtgagcacttccttcggcaaatctacttctctctttttctctatatcttttacaagcactttttttatcgtaaccggacagccgacctgatgcataagcttatcctgatggtcttgaataattttaacgacaccgcttccgacggtacctaaacctaaaagccctacacgaatcgctttcaaaaaaactccacctttcttttgattgtcctcttgaaaaagacaattgttaactcaacacagacatataagttacaaacattatataagcccgctcctgttttgacaagacagcattaggctgaattttgcgaatgtaaacgcttaacgcattgatatgacaagattctttattttctaattatttttgtcagattttctcctcaccctgagctgcctttgccgagccagctgacgcgtggaacaaacagcttctgcgcccgcatattcatgaattcctgcgctgtattgagaaattgttcataacgcccacagtcattaagaatgaagacaagctgttcttcaaaataatgcttttctgattctgatgacatgtaatagctttctacgatttcaaaataatgaagcgggaaaagcagacggctgtataaaaggcgtttcgaaaatgaagacagcggtgtgacttgctcgtattcctgtaaaaagagaaagccctgctgattaaaatcttgtctgtgatgcaaaaacgtatgcctcatatattcagccaaatcacgggaagcgtggtcaaacacccaatccgccggaatcctgatcaatgattccggtgaccatgtatgcctttccatccgctgatggcatatcgttcctgaatcagcggcttggggcttgtcatccagctcagtgtccactaaatattgtatcgcgttttctgacagtcctaaataatagggaaatgattcgatcatttttttatcgaatggctcatgcggaggggtctgaacctttctctgccaaaatgcttccagctgatcaattcgttttccccacagatccttccactggccgattcttccggccgccttcacctcatatggatatcctcggccttttcggtgaaattccgcaagctccgctccaatggagaacgccctgtttgaataagggggggccgccttcagcagagcgtacgtttttccctcatgttcaaatgtcagttcaccttcttttgtaaagataaaaaccgaaacgtatgggtcactttgttcttgtaaatactgactcatgtaataaagctccgccagctctgtttctgagaattgggaaacggggacaatcagaaagtatgaattaggcgtctgaaagcattgatatgtgtgctggtacatggaaagctgcctgatgtgaatgccgtatttttcttttattgtacctttcaccatgatcacctgcctgttgaattagggctcatcacatcgtagtcatacacagccggaattatgaatacatattttaatccgaagaaggcgcaagaaaaagtcgtaaacttctcaagcattttgtataaactagtaaaaaagattgggtgaagctgatgtcagaaaacgaacaattcagtcagatggaagctaaagcaagagcacggatgaaggagcgcggcgttgaggtatcagacattgccgagcttgtcttttttctgcagaaaaaatatcatccggatttaaccattgatgaatgcacgctgaacgtcaatcgtgttctcgcaaaacgcgaggtgcaaaacgcgattttaacgggcattgaattggatgttcttgctgagcagaaaaaactgtctgaaccgctgcaaacgatgctggaaatagatgaaagcctatatggagtagatgaagttctggcattttccattgtgaacatttacggatcgatcgggtttacgaactacggttacatcgacaaagaaaaacccggaatccttaaacgattgaatgataaatcaaccggtgaatgccatacctttttagatgacatcgtcggagcgatttccgccgcggcttcaagcagacttgctcaccgcgcgcggcatacagaataagggcacccttttagggcgccctttattcaaatgtatggaatccattcagtcagagagtcaatggcgtgagtcggtttttccatatcgtctgtcatatgttctcttttcgttacgcctgtgtgaacgagcagcgtatccatacccgcgttaatgccggccataatatcagtggcatagttgtcgccgaccatgagtgtttcagacacatctgtgccgagaacgcgcatcgcctgctccataataattgattccggcttgccgataaatacaggctgtacacctgtagatacggttaacaccgatgtcagtgagccgtttcccggcagaaggcctctttcagtcggaatcgcaatatctccgttagtggaaataaagcgggcgccatttctgattgccaggcagccgacagcaaatttttcgtatgtaatggaacggtcgatgccaacaacgacaaagtccgcgttttctccgccaaatgtcaggccgttttcttcaatcgcctggcggattccttcctccccaatcacatacacagacgcgtcttttttctgctgtgcaatgtgctgggcagttgccatgctggtcgtgaagacctgctcttctgttgccggaatatcaaaagacacgagcttgtccgctacctgcttcggtgtgcgcgaagagttgtttgtcacgaaaagataaggaacgccgcgatctttcagcgttctgacaaattcacacgcctcctcgattttttccgtgccattgtacattgttccgtctaaatcaattaaataccctttatatgttttcatatccaacactcctgtggctttccagttgttatttaaacgcggaaacaggtcctagctctgtttccaaatagcttctgatccgtttcgggaagtcctgaagagctgtttgatgcgccttgatcagcctgtaaagctcgccgctgtcagcgagcagatactgttgaaccaacgttttgcggtaggcgatcaattttttgagctcatcaccctctttttccgtgacaactttctcatcaacaagtatatccataatgtcgtcatagctgcccgggtcccgcataataaagccgtcaatcatgtcattgcctgtatccaaaatgcattcgattaacagatggcctatacgctgaagtgccaattccccgatttcagactgccagtctgtttgtgagtcaaatagcgccagctggtgctcgaagaaccctagtgttttctcgattttgcttctgtcaacaaaatacatgacagcatcccctttgtgtatatttattttctgatccgtttcaagacaaaatacgcacagccgaaattgcagtattcgtaaatatattcatctaatgtgctgattttcgtttcgaaggttgccttttgattctggtcgtcaaagaagcccttgagccttaactgaccgtatccccagtctcccacaatataatcgtatttatttaatatatcggagtagcgggctttaaaagcctcttcgttgaagccgtctttgaaattgtgcaccaattcaaattcggcattttgaataagaatcatgatctcacctctttttcactcattcctatcataattcattgccccgtccccatcaattgctaaagaataaatcatgcgatttggctaccctacacatgaggagggattgataaatgaaacgaaccgctgtcagcctctgcctgctaaccggactattatccgggtgcggaggcgcaggattggataatgcccaaaatgtccggaatcagacgcagaatcaaaccaaacccgttcatgtgtcggaccgcaacgaggcttttaacaggcataatgagaacgaacaatttggctatgtccgctatcaaaaagaacaatttgacggagaccagcagaaaacgccggtgatgaaccgggaagaaaccgctcacatgatatcaagtttaacggttcagcttccccatattcaagatgctgcgacattggtgaatgaccgagaagcgcttgtcgtatacaaaaccgattctaaaaaccgggagctgaccgccgatcaggtgaaaaaaacagcggcttccgtgataccgcgatactatcacgtgtatatttccgataatccaaaccatatgcagtccgtcgaaaattacagcaatctcggctctggttcaagggatattagagagatcatgtcggggacgattcaagaaatgaaaacctccccgcaaggaagccctgtctcagagaatgaaaatgccaatggagaaacgcgtcaggacatgaaaatcgataggaatgacaaaaacgccagatgatctggcgttttggcattatgcttgggcttgacgctttttagatgcttcgtttacttgttcatccgcatggtaagaggaacggacaagcggaccggcttcacaatggctgaagcctttttgcatcgcgatttcttttaattctgcaaattcatcaggatggtagtatttttggactttcaagtgtttcttcgtcggctgcagatattggccgattgccataatatccacgttgttcgccaagaggtcgtccattacttcaataatctcttcttttgtttcgccgagcccgatcatgatacttgattttgtcggaatgtcaggctgcatttccttcgcacggcgcaaaaattccaatgaacggtcgtacgtcgcacgcgcacggactcttggcgtcaggcggcgaaccgtttcgatattgtgattcaggatgtctgggcgtgtatccattaaggtttttaggttatcgtagtttccgcccatatcagacggcagcacctcaattgttgtgaacgggctttttctgcggatcgcacggacagtttccgcgaaaatgcctgcccctccatctttctgatcgtcacgcgcaacagccgtaataaccgcgtgcttcagattcataagcgcgactgaatccgctacgcgttccggctcttgcagatcaagctcagttggaaggcctgttttgacagcacagaaacggcatgctcttgtacaaacagaacctaaaatcataaatgtcgctgtacgtctgaccgcccagcattcatgaatattcggacactttgcttcttcgcatacggtatgcaggttgttttcccgcatgagttttttgagccctgtatagttttcatttgtatttaatttaattttaagccattcgggctttctgaggtgttcgtctttctttgccaattcccatcatctccaatatccaatatactcaatttctgacacgaaacattctgaaaacgagaaaggtgcagattttagttctgcaacaaaaataatgtttttctaactaaagaaagtcttttctttagacactttaacataggaaaaatttctcgacaagggaagatgattactgacatttttaagccgggttgccgcaaactatgtgtattcaatatgaaaggagattattttgtgaaagttttgttatccgctcttcttctccttttgtttgcatttgagccttctgcgtctggaaaaaagctttcagatccagtgctgtcgaaacggatggaattatatcataaaatcgaagctgtgacgcagatcccttggtatgcgctcgcggctgttgatcaatacgaagaaaacgtgcggagcaaccggaaagatctgcctgaaaaggcgggaatcatcagcatctatatacccgatgatatctggagcgggcctgaaaacccgaatccgaaagatgatgcgccgttaagcattaaagtgtttgacggaatcggaatggatggcgatggagacgggaaagccgaggtcagcaacgatgaagatattttgtatacgttcagccaatacctactgtcgtatggcacagatgaagacaacatccggatcgggctttggaattattaccggcgtgatcagacagtggggattatatctgaattcatgaagctgtttaaagcctacggccatattgatctgggcgagcatgcattcccgcttccgatcagaaccgattacagctaccgaagcacgtggggagatgcccgcggcttcggtggaaggcggattcatgaaggtacggatatctttgcccattacggccttcctgtcaaatccacatgttacggcgtagttgaaatgaagggctggaaccgcttcggaggatggagaatcggcatcagggacattaacaatacgtatcattattttgcccatctcaatgggtttgccaaagggattaaaacaggacaaatcgttgagcctggccaagtgatcggatcagtcggcagctccggatacggcccgccgggaaccgccgggaagttcccgccgcatttgcactatggcatgtacaaagataacggaagaaccgaatggtcatttgatccatacccgcatttgagggcgtgggagcgatatgaataccaaaaaaagaagtaacaaaaagccgcctcttcaacaggcggcttatttgctgcttttttctttttttgaatcggcaccgtcttctttgctgctcggaagctggacagaaggcgtgacacccgagccgccgcttccattataaaactgcggcacttcgccctgcactgctttaatcgatacaggaacattatttgtgacgacagcggttttgctggcaaatggaatgatgaccttcactttaatttcgacaaagatgctgatatcaataagtgcgttatttatgccatacggcttgattttggttttgacatctgtaaaagcgtcaccgattaaattgaaccggaccgggattttcggcccgaggtttccaagaaggctgttgccggttacctgtcccagcggaatgttgatcataatgttttcactggcgccgctgtgtccggtatgggtttccatctctttcaaatgagcctgaagctgctttgtcacttttgttttcacactgtttacaacctgtgtattaaaatcgattgtcgttaagtttccgttttcatcagaattcatttgaaacatatctttcatattttcactgtcagacatatagtcctcaatcgaatcctggatcacctctgtcgctatacgcttcgtttccatctcgccgatgtccattaaaacaggtttgatcgagccattgatcatccaaaggctgaccgttgttgacaggataaaaaagacaacggacaggagcatcacgtaacggaaaggcaaaggtcctctcttgcgaaaagggccgcgatatcttggcaagaaaatccccccttacatatcacaatgtatgcttgtaagaggggacatagtaatagccggggccaatttattttatttcatcatttttaaaagcgcttctctgccgctcatgccgactttgatgccaagatcttccgcagcgtacgtgacggattctaaaggtgcgtctaacagctggtcaatggtgcggacaccaactgcgcgtcccgccacgatgccgcgctcctttaatttttcattcagcagcgccacatcaagcgcgccgcacataatgtatccgtgatcattggcgacggccataaaattcgttttgggaagctttactgtcacagctgtaaaaggctgtccttctatcatgatcggtgtcaggtttaccacgtcaaccactcccttcattcatcactttatgatgaagggcacagcttgttgtgggctgactgccttattgtgcaagcttccaagcaagcagatcccgcaaaaattccggcataaaatattctttttctgcagcgtcgcgaatcaacggaaacagtttgccgagcgtaaacatatcaagcaccgcaacggagtattgtttatgtttttcaatatcttccccgttcagtgtgatccgagtgacgtgggtgatcccgtcatcgagccgtttcgtttctacctcaacgccggcatacaccattttccccatcacttctccgcggaagccgagtcctttgatccggagctgctccatttgttcggaagcggcatggacaatggtttccttcagttcttctcccgtcaggcggacagccaccgggttgatcggatgcggacagatgcggtgcagatccagctttgtcacaggacctgcttttagcggaccgagaatgacacctgaattgaccatactaatgtccgtctcgcaccattcctttaaggcgtatgctaaaagcaaaggcagctctgattcttcaaaccacttcacctcagcatcttgtgcaagctctgcaacggcatcggacagtttctcctcggcttcacgttctttttcattgagaaacgcttttgtttctgcggattctcctgtccattccgccatgttctgcacagaagccgttttgctaatgatgcttcgctgtacgctgtccaccgtgatttctacacagccgacataatggccgtatttctcggcgctggccagcagtaccccattaaccacttgtccatcttcaagcaaatgatgggtatgtgattcgaggattacatcaatctcaggcaccgcttcagccactgcttgatcatcaagaatgcctaaatgtgacagcagaacgataatatcagcctgccctttcacttccagaatggtttcctttatgctttcaagggcatccgtaactgtccatcccagcttgtcatatacaggataatacggcacagttacacctaagaaagcaatggacataccgtttttcaatgatttgatatggtaaggcaccgcccaggacggacggtttccatttttatcaaacaggttagagacgatgacaggaaattcagcatgatcatataagacagcaagctcttcatgcggaagcgtaatcccttcgttattgccgatcgccgctccatcaatgtgaaggcggtttaagagatcgacattcgcttttccgaatgtcgcctctgtcacgaattgaaaacgatcaagatgatcgccaatatcaaaaacgagcgtctcttcgccgtctgactgatgctcttttcttttctgctcgatataatctacaattttcggccagttttcaaaatggctgtgcaaatcatttgtatgatataagcggagcttctccttcataatatctctccctaatcgttcagctgaaaatgccttcataaatgagctggcagccgatcaaaatcaatacgatccgcatgatcataacgatcgttttcgtctgcatttttctgttgatggcggcgccaagctttccgccgaaccaagcgccgggcacaagcgcgagggcgtacagccaattgacgtgcccggaaatcatatgtgaaacagaccctgtcatagaagacaggaaaataataaacatggacgttgccaccgcaaccttcggcggaaacagaaataacagcatcatcgccggaaccatcagtgatccgccgcctataccgaaaagtccgcctaaaaaaccgacaacaaaggcaatggcaataccgacagaggcctgatatgagtacgtataaggctcaccggcatcatcctgaaatgtccggataattcctttgtgcgctttgttgattggccgggctttcgctttcagcattaaggataatgaaatcagaatcataaaaatgccaaaccaaacggaaaacgagtttgaattgaacagctttgacacgtaagccccgatcatgctgccgggacccgaaccgataaagaaaatgagcccgctcttataatcaactgttttatatttaatataagccaaagttgaagaaaggcccgtaaaaataatgaccaaaagcgaagttccaatcgcaacctgcggcgtcacatcctgaaacagctgcgtcactgtgcttaaaaacatcagagatggcacaatgacaattccgccgccaagcccgatcagacttcctaccgtacctgcgattaatcccaggacgaccaaaatcacaaacgacatcaatcaaaacctcttttctaaaataaatcgagctgtctcggagcaagtccgctgtactcgatatcaagcagttcaagcatctgcttgccattatccgcagcgtcaccgccggaattgttgttgaacaggacaaaaacatccttacattgctgctgcaatttattcaggtgctttttccaatcctccagctcctgttggttgtagcggtataagtacctgacctcccgccagtttttcccgccatcaggcttcatccagccctgcttgttgcgtccgtgaaacctgacgagcgttttgttttcatcggtcgcgcgcaacacggtcggaacgctgccttctccgatttgcggttcatcacagacactgtgaatccagccttccgctttcataaatgaaagcgtctgctcataaaatggcggcgagaaccaggaacggtttctgaattcaagcgcgcaaggaatatctcccatttggtgcttgcaccatctcaaataggcgacattctccttcttgcagtcaaaccacggcggaaattgaaacagcaccatggcgagcttattgctatgtaaatatggcgttaaagacaccttaaacgcatcaaacatctcctcttttgagtcaaagggaatttcgccgcgctgatgccctgtcatgccctgatatgctttcacgataaattggaaggtttcgggcgtttccttcacccacttttcattattgcgcgccggctgaatcgcgtaaaagctcgcgtctaattccacgatcggaaaatgggaggaataggcctgcaattttttctggctggccgttttcggcggatagatgctgtcatgatccccccaccccgtcagtccgatataaatcacactcattcacctctcttccagtttatcacacgtgttttcaggtttcctcggaaatgctgttcatatggcgggaaaatgcagaacgaagatgctgatattgttcctcattcgtatctaaaaacgcctcttctcttgaggaaggaatatgctgatattcaataggcgcctgaaactgctcactcgtaaaatcgtacatcacaccattgatgctgttgtaaaaatgccagctctcaccgacttttgttttgaaaatcgtgccgccgaaatggtcttgaatcaccaatgccgtcacgccgcattggccgcatgacgggcattcttccgtccatttagagctcgaatggcgcgaccaggattgcttaagtatgtatttgacatgctccattgcctccgcctcctttaaaaaaagataccacgttgatgagattttaaaaactagaacggaggaaatcaaaaaacccggcggtaaaatccgccgggcttacgaaggaacgaccagagctccgtcaatttcagtgaccttttccccatcattgtacacgcatcggcctttgctgtaagtggcccaaatgctgcagggaaatgtatgtccttcgtaaatgctttttttatgctttgcaaacatcgattctcttgtaacagtgtacggctccatgctgacgagcacgaaatctgcatcacaccccgcctcaagccgcccttttttctgaaggccgaatcgttttgcaggggccgccgctgtccattctgcgatggtttcaaacggaatctgatgctcaagcgccagttccagcattcctaataaagtgaactgcccgccgctgattccgccccatgataaaaacatgttatcctcccgcttcaaggatggacggcagggggaatggtctgaggaaaccatgtcaatgtccccggcaatgagcgtctcgatcagcgtctcttttgattgcagcgaccggagcggaggcgcgcattttgcgacagagcccctttgccgtaaatcgtcatggctgaacaagacataatgcgggcatgtttcaaccgaaacatcaagaccttcctgtttcgcctctctgatcagccggaccgctttcgccgtgctgatatggacaaaatgaaccggacaacctgtcaccttcgcatactgaatcgtgcgatacaccgcttcaacttctgcttcctccgggcgggaggcggcgtacgcatccgcgtccacctttcctttattggccaaaaccatctgcaagtagcttgtaatcgcgtcactttccgcgtggagagcgaggatttttcctgcagccgcgatttctgccatgcctttgagcaatgtccgttcatcaacagagcggaactcatcagtgcctgactttgataaaaacgctttaaacccgatcgctcccgcttcagccatcggacggatgtcctcgatatggcctggcacaaggccgccccatagcgcaaaatccacggcagatttttgcctgcctagctcagcttttgcgagaagatgctctgccgtcacggttgatggaatacagttgagcggcatatcaaaataggtggtgcaaccgcctgcggccatcatttgagaacctgtttcaaacccctcccaatcctccctgcccggttcattaaaatgaacatggcaatctatcacaccaggaaacacgtatttcccgtctgcctggatgatttccgtcccgcttgcttcaatgtcagaacctatctcggcaatgacaccgttttgaactgcaatatcagcttctataacgccatctggcgtaactgccttcgcaccttttatcaccatatcgtaagccatattgatccccccatgtaaggatgacgatttttcatgtcagtttatgtaacacaaccagttctattttcaacagtttactgctactatgatcgtattacatcagcaaaaccgctagaattcctattgaaaattattcaccttaaccaatgtttttatagaaaaggagaatgcgctatgaatatttttgatgtgatgaaaataccggcttttaaaaacgccaatttaatcgctggaaaagcaggaggggaaagagaggttcagcatgtcaatatgatggacgctccggatatcgcagactttttgcataagaatgaattgctcgtcaccaccgcctatcacctgaaggatcacccgcatcaattatctgaactgattcggcaaatggcaaaacgcggctgcgcgggcctcggcattaaaacaaagcgctatctggaagatatcccgaaggaaatcatcgaactggccgattcatatgcgtttccgatcattgagcttccggaacacatccgactcggcgatattgtgaatgccacactcagccatattctcgatatgcgttctaacgagctgcagcaagctatttacgcgcacaaaaaattcacaaaccacattatgagcggcaaggggctgcaatccctcctcaaaaaggtgtcagacctccttcagcttcccgtgctgctgcttgaccagcatgccaaaatgctgtctgcgtctcatcagatttcagttgagaccgaaaagctgaaaggcaccctgaataccgtatccgggccatttttcacttgtttctctacaatctcagatcagaaaacatattctgtcctgcctatttataatcacgaaaaaaactgcggctacctgctgataccggacatggtgcaggcaggcgacaaaggattgatcctcacgattgaacaagcggccaacgtcatttcctttgaactgctgaaggaaaatgcgctgaagcagttcagccggcgggcccgcaatgagtttttcaacaattttattgagcggaccttttcttcagatgacgaaatcaaaaaccgggcgaaagaattcaagctgcgctgggatcaaaaatacatgtgcatcgccggcaaactcgatcgcaatgacgaatcaatcagctttacagaaaatcagctcgcttccgacagcgtattcgaatttcttgaaggtgaattatcagccttcccgtttccgcctcacttctttatgaaaggaaacgtcggcattattctaatcgaagcgacagacagctggagtgaaatgcacgcctcggtgatcagctttttagaacagttccaaacacaggtcagcgctcaatttaaacgaaccgtgtcctttggcatcagcaatatctgccaaaagctcattgatgttcccgacgctttcacagaagcttctgatgctctgcaatcggggcatttgtcgagaagcaccgcatttatccaggtgtatcacgccaaagatgtgcctgagcttctgcgcttgctcccggttgaggatttgaagaaattttacaactccacgcttcagagcctcgctgaaaaacagcaggaggatcaaagcctgcttcatacgctttccgtctatttagagacacactgccaaatttcagagacggcaaagcgtctgtacgttcatcgcaatacggtcatataccgccttgaaaaatgcgaagagcttctgggtaaaagcttaaaagatcctgaaacaacgatgcgtttgcggcttgccttacgtatgcagcggctgatcagctaatgctcgttacattttcttacaaaacgaatcatttttcgtcactttcagcaatcacacctgtctttttcagctactgtatccaatgacacccctcgatcggcacgatatcatgttactaaagttcacatacagggagggactatagtgaaaaaaagatcgtttaaggtgtttacacttagcctgcagcatgtgctcgccatgtatgcaggtgcgattttggtgcccctgcttgtcggcagggcgctgaatgtaacaactgaacagctgtcctacctattggcgattgacctgttaacatgcggcgtcgctacgcttttgcaaaccttgcgcggaacatacatcggcatcgggcttcccgtcatgcttggcagttcatttgtggccgtcaccccaatgattgcaatcggcagcaattacggcattcacgcgatttatggttccatcattgcggccggtgtgttcatctttttgtttgcgcgttttttcggcaagctgactgtgttatttcctcctgtcgtaacaggtaccgttgtgaccttgatcggcctttcacttgttccgacaggtgtgaaaaatatggctggcggcgaaaaaataaacggcagcgccaaccccgaatacggttcgctcgaaaaccttcttctctctgtcagtgtccttgttctgatcttagtcctcaaccgctttctcaaaggatttgcccgaacactgtccgttctgatcggcatcgccgccggaacagcggcagcagcgatcatgggcaaagtcagcttttcttctgttacagaagcaccgttcttccaaatcccgaagcctttttacttcggagcccctgcgtttgaaatcggtccgatcttaacgatgctgatcgtcggaatcgtcattattgtggaatcaaccggcgttttttacgcaatcggaaagatatgcggcagacctttaactgaaaaagatctcgtcaaaggctatcgagcggaaggaatcgccattctcatcggcgggctgttcaatgcctttccttataatacctttgcgcaaaacgccggcttattgcagctgaccaaagtgaaaacaagaaacatcgtcgttaccgcaggctgtatccttgtctgtctcggactgattccgaagattgccgcccttgcatctgccgttcctgctgctgtacttggcggcgcgaccgtcgtcatgttcggcatggtgattgcctccggcgtcaaaatgctcagcacagcggatctcaaaaatcaataccacctcctgaccatcgcatgctcaatcgcactcggcatcggcgccagcacggcccccgggatttttgctgaattccccgctccgattagaattctggtcagtgacggcaccatcactggcagcctgaccgccatctttttgaatctatttttcagcttgcgcgacaaaaaagaattaacagcacagcaaacagaacttccagtattagaacatacactcgcattagaaaaagaggtgtaaaaaagatgaaggaacagcacaatgccttacagctaatgatgctggggcttcagcacatgcttgccatgtatgcgggagccattctcgttccgttgatcgtcggagcagcgatcgggctgaatgcggggcagctgacgtatttaatcgcgattgatttgtttatgtgcggggcggcaactcttttgcagctctggagaaaccgatatttcggcatcggccttcccgttgtgctcggatgcacgtttaccgcagtcggcccgatgatttccatcggaagcacttacggtgtcccatcgatatatggtgccattatcgccgcaggactgattgtcgtcttagccgcgggcttcttcgggaagcttgtccgtttttttccgcctgtcgtaaccggatcagtcgtcatgatcatcggcatcagcctgattccaacggcaatgaataacctggccggaggtgaaggaagcaaagaattcggctcactcgacaacgtgctactcgggtttggcgtcacagcttttatcttattgctgttttatttctttaaaggctttatccgctccatagcgattttactcggtcttatcgcaggaacagcggctgcatatttcatgggaaaggtcgatttttctgaggttttggaggcgtcttggcttcatgttccgtctctgttttatttcggaccgccaacctttgagctgccggctgttgtcacgatgcttctcgttgcgattgtcagcctcgttgaatcgacaggcgtttattttgcgcttgcggatatcacaaaccgcagactgtcggagaaggatctggaaaagggctaccgggcagaaggccttgcgattttgctgggcggcttatttaacgcgtttccctatacagctttctcgcagaatgtcggcatcgttcagctctcaaagatgaaaagtgtcaacgtcatcgccatcacaggaatcatactggtcgcgatcgggctggttccaaaagcagcggccctgacaacagtgatccccaccccagttctcggcggcgcaatgatcgtcatgttcggcatggtcatttcttacgggatcaaaatgctatccagcgttgaccttgattcgcaaggcaacttgctgattatcgcctcttccgtcagcttggggcttggcgctacaacagttcccgcgttgttttcatctcttccgggcgcggcctctgtcttggcaggaagcggaattgtgatcggcagtttgacggccattgcactgcacgctttttttcaaaccaaacagccgaatggcacagacataaaaacgtaaaggaagatgccaatgttcacaatggatgacctgaaccaaatggatacacaaacactgacagacacacttggctctatttttgaacactcttcatggattgcggagagatccgcagcactacggccgttttcgtccctttctgatcttcaccgcaaaatgactggcattgtaaaagctgcggatcgcgagacacagcttgatttaatcaaaaagcatccccggctcggaacaaagaaaacaatgagcgatgactcggtacgagagcagcagaacgcagggctcggcaaattagaacagcaggaatacgaggagtttctcatgctgaatgaacactattatgatcgcttcggctttccttttattttagcggtgaagggaaagacgaaacaggacattcaccaagccctgctggcaaggcttgagagcgaacgagaaacggagttccagcaggcccttatagaaatttaccgaatcgcccgctttcgtctggctgacatcatcactgaaaaaggagagacgcaaatgaaaagaaccatgtcttatggcaaaggaaatgtatttgcataccgaacgtttttaaaaccgctcactggagtgaagcaaatcccagaatcatcttttgccgggagaagcaattccgttgtcggcgttgatgtgacatgcgaaattggcggagaagccttcctgccatcatttacagacggagacaatactctcgtcgtggcaacggattcaatgaaaaactttatccagcgccatctcgcatcctatgaaggaacgacaaccgaggggttcctacactatgtagctcaccgatttttagatacctattctcatatggacaagatcactctgactggtgaagacattccgtttgaagcaatgcctgcatatgaggagaaagagctcagcacaagccacctcgtcttcagaagatcgcgtaatgaacgaagccgctctgtgctgaaagcagaacgaagcgggaataccataacgattacagagcaatacagcgaaatcatggatcttcagctcgtcaaggtgagcggcaactccttcgtcggcttcatccgggacgaatatacgactctcccggaagacggcaaccgcccgctgtttgtctatttaaacatcagctggcaatatgaaaatacaaatgactcatacgcttctgatccagcacgctacgttgcggctgaacaagtccgcgacttggcgagcaccgtttttcacgagctcgaaaccccttcaatccaaaacctaatctatcatatcggctgcagaatattagcgaggttcccgcagctcactgatgtcagcttccaatctcaaaatcacacgtgggatacggttgtcgaagaaatcccgggctcaaaaggaaaagtctacaccgaaccgcgcccgccatacggtttccaacattttaccgtgacaagagaagacgccgagaaagaaaaacagaaagccgctgaaaaatgtcggagcctgaaagcctgatgggaaaactgacaacccatattttagatttaaccagcggcaaaccagcggcgaacgtaaaaattgaattgaagcggctgggcgaaagtattttgaaagaggtttacactaacaatgacggcagagtcaatgtccctctgctggctggtgaagagctggtttccggagagtatgtgatggaatttcatgcaggagactattttgcgaataaaaacgtgaatacggtcgaccagccgtttttaaccatagtcaccgtccgttttcagctagcagatccagatgcacattatcatatcccgctcttgctgtcgccgtttggttatcaggtgtatagggggagttaagaaggaagcccgcctcaccggcgggcttctatttgcacttcaataaacttttgatcctaggacagtacttgaagtgatccccacacttagtgaaacaacagctagaataaacattcacctatatttttcaggataattgcctacgagaaaaatatcctgtagtcctttcatttataaatcgaggtttcaaactaataagtcagctcttagcagccgagctcccttctccaatcctataaacagaccgcgttttttctcgaaaaaatactctgaagacaattgctgcgtttttaatagttttgataacgcgttctctcttacacctttagacaaaatattcattttttcttttttagacttaaatctatgtcgaaaatgatcgttggcatatcttatactatctccactaaaggaggtgacattatgggattctacaattctggtggatacagtggaaactctggttactcaaacggtttcgggagctccttcgctttgatcgtggtgctattcattttgttgatcattgttggagcagctatctttaattattaagtttaactttccttgcctccgccgtatccaacacctccctgtccgacagacgccataagaagtttttatggcgtctttgctatgtgttcactaatctttttctaatcagctttcaagttctacgagatttatcgtgtgttttcccacaacgcttctgcgtcttgatcgcgctgtctgactgaggctaaaaaagtccggcttttaaaagccggactcccgtctacccccgttcaactctcttctaatcctgcaagctgaccgcataatcccgccgtacccggtacaccggcacaaattccccgccagcccttcttctatatcttcgtcagaaggttgaggggtttcccgaaacagtgctttaagcgcaattatcattcctggggtacagtagccgcattggaagcctccttcttccagaaaagcggtttggcagatatccagttcctcttgttgtacgccctcgattgttgtaatggaatggccgtccacttgataagccatggtcatacacgcattggccagctttccgtcgattaaaatagagcaggctccgcagcggccgattccgcaggacacctttgtcccggtcagctgaaattcctttctaagcaggtcactcagatgtgtcgtaggaacggcagcaacctcccactcctgcccattcacggtcatccggaactgttccttttttacaggaaatggcccggcctcttttacgtccattgcttcagcccctttctgtctatcgcttcaagcagctcttctcttgaaatcggcagcttgtttatccagcatccgaccgcatcatgtactgcctttacaatcgccggagtgatggcgattgttccgatttcgccaacaccgcgcggtccatatacgtctcccttcattaagtcttctattgcaatcaccttcatgtcaggaacatctttgattccgggaatcaaatagtgatcgagattttccgcagcataacggccatccgtcattttcgcttcctccatcagtgtgtagccgagtgccatggcagcgccgccttcaatttgacctcgatatccctgcggactgatgaccggacctgccgcaatagcgtgctcacaatctatcaatttgacatcgcctgttaacagatctacctccacctcaacggcagccgctccaaatgagtagaggaaatggccgcccaccacaggatcaggcgttgttggaaagtcaaatgccgtttcctctgccaaagggcctttttcagccagctccttatacgtcaccacgagcgcctttgtgtttttgtcacgcaagcctgcagcgccgggaataagattttccgctgaacagccgctccattctgccgcccgttttttcaactgagctagaaacggcttcttcaaacgctggatcgcgtgccacaccatgcttgtgccgcgggatgctgtggaggagcctgacttcggcacttttgcggtatccccaataacaatggaaatatcctctgcggcacaacctaactcctccatgacaatctgttcaatcgctgctagaatcccctgtccgcattcttcaaatccaaacgaagcagtgattttgccttcactcgaaagagacaaacggcctcctgccgcatccattcggccataccccagcccgccgccgtgcattgtaattgccgctcccgtgcctctttgcagatacccgcagttccggctgcttcttgtaagaatgggagatttagatatggcattcaacacctgtgccgctccgtcagtcggtgcaatccgatgctcaagaggccccaagtcatgcggttttctgatattttttcttctcagctccagcgggtcgatgccgagcatgccgctgagacgatcgagatgggtttcgagtgcaaatgtgatttggttgccgccaaagccccgaaattcccccgccaccccgttgttcgtaaatactgatattccttcagtccggatattcggaatacggtacggccccgcggcatgctcgacagaaaaatctagaacggcaggcccaagcgtggcgtaagcgcctgtgtccgccacaattttcacgtcgtgcgccaatagatttcccgaatgatctgcacccgtttttatcgtaatcttcatcggatggcgcttaatgccagaacgtacagattcctttcgtgtctgatggattttgacagggcgtccgcttttcagggccaaaagcgcagcatacggctgaatattcagctcatccttccctccgaacgagccgcccatcggacttgacacaattctgatcttctcttcaggaatatcaaaaatacgggcaagctggaaacggtctttatagccgtgctgggttcctgcatacatcgtaaaacccccgtcgtcttccggaacggctacgcctccctccgtttccatatacgtatgcatctgccgcggcagctcataggtttcttcaaggactgtgtcagatgcttgaaacccttcttccacatcgccgtttgaaaaaaatgcgcggtggaggatattcccgtcctcatgcagtctttgcgcattcggccgaagcgctttttctggtgaatccatgacttccagctctttatactcaactcgaatcagctccagcgccgcttccgcgatttcttctgtttccgcagcaactgcggcgatcgcatccccgacataccgcaccctgtcctcacataaaaccggctgatcagggatgacaatgccaaatcggtttaagccgggaacgtctttatgtgtgacgacggcctgcacgccttccattttctcagcttttatggtgcaaaccgacacaatctctgcatgaggataagcacttctcagcaccttgccatacagcattcccggaaagctgagatcggtcatatatttcaattcccctgtgaccttatcccttccatccggcctgactcttgacggtttgttgatgatcatttattcccctccctcagccatcagctctgccatgatgacgttggcagcggctttttttctgtatgccgctgacataaaagcatctgaggaaaacggcagctcatggataagtgttttgtacagctcatgcgagtcccaccctggtgccatccatttcgcttcgctgtccaataatctcctaggagtgatatcggcatggccagcggcgaggcgaatgccgccgtctttcaaaaaacgtccagctgcaacagcaaccgctcctgtaaaagcctgacgccttccaagcttgtgataaaatacacgctctccctccgcccgcgggatgatgacacgcgtgacgatagccgttctaaagtcttcctcaatgagccaagcgccaagcggcagcctgattagcttcttttgatatacgataagatcagcatcaagcacaagcagaagcggaatgaaatcaccgattttactcgctatgttgccgccaatcgtggcacggctgcggattcccggtgcggcgacagcggaagcagcgtcactgaaacagccaagcgtgctcttgatcaaagggttctttctgcattcactcagtgatgtgagcgccccgatcgacacgtgggtgtcactggcgctgatccctcgcatctcgtcaatcccttcaaggctgacaaggtgctgtttcggtagagttcctttgtcccactgaagctgaagcagcgtgcttcccgatgcggcacacacatccggagcaagcttctctaaaagcgaataggcctcatcaagcgctgccggcctccataattgaatattcatccttgcttttgtcacttggccgttcaagccatcgccctccttaccatgtcatattcctcgggtgtatcaatatcgtccaactcgccgctatcctttgcctccaaaaccgctcctgctccaagctgtccgcttttcaggagcctgcgagccccttcatctcccgttaacccctttacataaggaaaacaagccgacgagaagtagattggcggggtgaacgcccctaaaaacgatgacacggcaaatggctcaggggccagtgccacaagggcattgagatgatcgacggaaagctgaggctggtcggctaacaaaatgacaacgccgtccgcccccatgctttctgcttttctcaccccgctgctgactgaatgcccctgacccttttctgcgtcttggcaaacgtgcaggctccagcgtttttgaaaaggcggagcgtgatacggcgctcctatccactcaagggaggcatgttctgtccgctcgacgaccagcacgtgatcaaggcgggacgacagagcagttttcaaggaaagtgagccgatgttttctccttttagcggcaaagccagcttgttttgacccattcttctgcttttgccggcagcgagaaacacgccgatcagataggggcttctcatacaaccgctattcgttttcttgtttgaatgatttctgcaactacacttaccgcaatttcctctggaccttccgcaccgattttcagcccgaccggactgtaaaagtgagacggaggatgttttccgttcagcagccgtttcgtgcggtttgccgaacccaacagtccaatataatggaggttttgagaaaataagaagttgatgatcgtttgatcgtgctgataatgatgggttgccacaacagctgcatcatgcggaaaaaattgaaatttgctaagcattcgttccggaaaagcggtgatcagctgatccgcttttggaaaaagagaggatgtacaataagcgggccgccaatccgtcacgataacagaaaaccctgtgtcagccgccaaattggccagcggtacagtatccggtcccgccccaaacagaatgaggcgcggcttcggttcaattcgctgaataaacatgttagtgggtggatcgaaatgcggtaaatgaagcgttgaaacagtacgttgaatatcttgcagaggcgcgtccggccagttgccaaaatgcccgttctccgtcagaaataaataatgggaggattcaatctttataacagaagtgacagctttgcctgaatgaaggcaatccctcactttctcatagtgccgccttttttcctgagtgattcgctctgcatgaacatgaataatgccattgcacccggctcccatgccccaagaaagatcgtcctccgaccgcatgtcgtagggaatcagcgttgatgtgagctgatcgcccagcgcactgattctttggaatacatcttcttccacacacccgccgctcagcaagccaatccgtctgccttttttcttaaagagcatagaggcgcctgcttttcgatacgcggagccttcaacttgaacaattgtcgccagtacagcctcctcctggtcttccaggagcgcatctaacatcgtgtgaaaattccccaatgccgcatcctcctctcgaaaattgccgtgagaaacaactagttcagcgtgattttataggtaacttgtataaagaatagacgatggaagaaaaaatgactcatgatttgtcagaaaatgaaacacatagaaagaggatttgtaaaaagagtcaaacgaagaaaatcagattggagaaaacacgaaatcatatctaaaaagcttgcggagttccgcaagcttttctttacaccgctgcctggcggccagcgttttcatacacatccagcgctgcttggagcgcttttcctgcttcgattcctgcgttatgtctgagaagcacagcctctaacccggcaagcacgaatagcacgttttcttttctgcagctgtaccccatcgtgccgattctccagatcttccctgcgagcgggccgaatgagctggcgatttcaataccgaattgtgccagcagcatgccacggacagactcgccgtcaatgccgccgggaatttcgacacaggtgacaacaggcattttgcagctgtcatctccaaacaatcttagccccattgcctttatccctgctgctaatgcggcttcatggtgccgatgccgctcaaaacgcgcctcaaggccttcttcaagcaccagtctgactccctcacgtaaggcgtacagcatcgtcgtcgcttctgtatgatgattgagccgtctttcgctccaataatcctcaagctggctcaaatcaaagtagttgcttgtgattggccgatttcccgaaagcgcttccctgtcagcttgtgacgcaatcccccgctccacctttttacgagctgcaatcacgtccgccacccgctcattatatgtaatcggcgccattcctgagggcacagacaaacacttttgcgttccgccgatggcagcatcaatcttccattcatcgactttaacctcgcagcccccaatcgttgcgactgcatcgacgataaacaatgcatcctcggtgcggcaggcttcgccgatggctttcagcgggtgaatccgtcctgtcgatgtttctccatgcaccatggccacaattttcggcttcactttttttatctcccgtatgatgtcctccgggtcaaaaaccgttccccattcgcactcaagcatatgaacatttgccccatatcgctcggcgatttcagtcagcaaataaccgaaacggccgtaaatgggaatgagcacatcatcttccggctctatgacactagccagcactgcttcaattcccgcccgtgaagtgccgtcaatcgggtatgcccagcggttttttgtttggaacagctcccgaagcatctccatcgtttcattcataatacctgtaaacgccggatcaaattggccgacaaccggggtgctcattactcttaatacacgcggatcaacctcaacaggccccggcgtcataatcgttcttaacggggtgcataattctcttctgcctgacacagccattcctcctttatcagtaagccagtttgtataataaatcagtcagtgcgcggacgccgatctcaagctgtctggctgacgtatattccttcggtgagtggctgacgccgcctcggctcggcacaaacagcatacaagcaggatagcgccttccgatcatttgcgcgtcatgccctgctccgctcaccatttcctcacagctgaagtcgttttctaatgctgtttcaaaagccgcagccttcagcctttcgtccatcggcacaggctctatccgcatatattcatcaatcacagcgcgaattcctttttgtaggcaaatgccgttgatcaaagcaatcatgtcttgatgaaactgttccagcacatgctgatgctgatggcgaatatcgattgaaaactggacgcggcccggtatgacattggctacattgggctctgccgttatttttccgcatgtcagacggagctcatccggcagctcctccgaccgcagtaacagctcatgaatgatacggctgctggctgcgagcgggtccttgcgccatttcatggaggtggttcccgcatgattgcattcaccctccagcgtgacgagatagcgcctctgccccgcaatgcttttcacaatcccgagatcccgtcctgacatttccaatgtctgtccctgttcaatatggagctcaacaaaagcgctgatatctgtccgatatgctgcctgaaacacacctttgccaaaaccgttctcatgcatcgcatgttgcagcgagactcctgattcgtctcttggctctgctccatcctgtaatgaaaaaacacccgtcatattccctgatccccaataggtcattggaaaacggctgccctcctcctcacataaggataccgcttcgagtgtttttttcggcgctccatatgtctctttgagccgctttatcgcaagcattgctgccagaacaccataggcgccgtcgtattttcccccattgatgacagtatcgatatgtgaaccggttataatgacttcatccggagactgggtgcccgaaagccttccaaacaaattgccgacatcgtcgaatcttgtgtcaagcccgaaagaagacatttccgttttcacagcaagctgtgcgtccatccactcttttgtgtataaaagcctcgttacgccgccatccgcagacgcaccgtattgggcgagccattcaatataatctgtgatgctgttttttactgaaagcttctgcttttccatgtactcccccctctggccgctatggtgacttcattatagaaggaggaacatgatagttcattgacagattaaccaaaaaaacgtttattttttagtcacagtatctatccagcaaccagattcaccctacatgtcacaactattttgatgtaaaggtcaaaaggaaacacggtaaggaagagagccagcaagagcgaaagagagggtcaagctcagcttgccagagaggcgatgtttgcggaacggatgaaaacggaaatgccggcagctcgcaaaaacaggacctaaagatatgggaacaggagatttccgcctcctccaaagggactaatttacaattttaatgaaaaatatacaaaatgacacttctatcctttatttcaattttagataatagacatgatctgataaaaggagggcaagtgatgacaaaaaaatcatggtttctgccgctcgtctgtgtattactgatttccggatggcttgcgccggcagcttcagcaagcgcgcaaaccgaattaagcctcaatgaccgattggcgtcttcccctgcaggaacaggaagccttctctcattagccgcccccgctgcaccctatgctgacacagatacctattatgaaggggctgaaggtaaaacaggagactcgctaaaaagcaccctgcaccgtattattagcggacacacgatgctatcctacagcgaagtgtggaacgcgctgaaagaaacggatgaagatccgagaaatccgaataacgtcatcctgctctatacgaatgaatcgcggtccaaaaacctgaacggcggcaatgtcggcgattggaaccgcgagcatgtctgggcgaaatcccatggcgattttggtacgagcaagggacctggtactgatattcatcatttgcgcccggctgatgttcaagttaacagcgcaagaggaaatatggattttgacaatggcggcactgaatatgcgaaggcacccggaaattattatgacggcgattcatgggagccccgcgatgatgtgaaaggcgatgttgcccgcatgctgttttacatggctgtccgttacgagggtgatgacggctatcctgatcttgagcttaatgataagacaggcaacggctcagctccttatcatggcaaacaatctgtcctgctcgaatggaataagcaggatccggttgacgaccgcgagcggaaaagaaatgaaatcatttatgaaaaatatcagcacaaccgcaatccatttatcgaccaccctgaatgggcggatgagatttggccgtaagaaaaaggtgctccttttgaggagcacctttttctaatacacagcctcttccgtttccgcatcgaaaaagacgacgtggtccattttcactgagagctggattgaatcgcctgcatcgattcgcgtgtttccgtccaggcggaccttgagccgctcgtccccagccatgacatgtactatgagctccgagcccagattttcattcacttccacgttcgcttgaaacactgaatcaaacaactggtcatttcctgtcatttgtgtgatgtgctccggccgtacaccggcaatcatctgttctccggcatatcccttttccttcagccgctttgctttttcttcaggaatatgaagccggatcgaagaatttgtgaaaaacagctcgccatgctgctgttctatgatgcctttcaaaaagttcattccgggagagccaatgaagcctgcgacaaacaaattggccgggtaatgataaatgtcatgaggtttcgccacttgctgaatttccccttcattcatgacgacaatccgatctcccattgtcattgcttcggtctggtcatgcgtgacataaatgatcgttgcctctaatcgctggtgcagcttgctgatttctgtccgcatcgtcactcttagttttgcatccagattagaaagcggctcgtccattaaaaagaccttcggctccctcacaatcgacctgccaagcgccaccctttgccgctgcccgccggagagcgccttcggttttctcttcagcaaatgttcaatttctaaaattctggctgccgcatgaacccgctcggcaatttcctgtttcgccatctttctgagctttaatccaaacgccatattatcaaaaaccgtcatatgcggataaagcgcatagttttggaataccatcgcaatatcacgttctttcggcggaagatcattgacccgctccccatcaataagaagatttccttcagaaatgctttctaatccagccaccatccgcagcgttgttgattttccgcatcctgacggccccaccagcaccaaaagctccttatcctttacatctaaatcaaagtccttcacggttaattgtgagtgatatgattttttgacgtgttcaaatgttaatgaagccatcagaaaagtccccctatcttttgacccgttatttcgtcactggaaacaacttggtctttctgttatttttagagtaatcgattcccatttttgctatatttctaaaataaaaaatgtaaatttgtattataacgtcataatacattataatataaataataggttaaaaggaggctaccctttgttaaacaacggaagttctacacctttatacattcagctaaaacaaatcatcactgatgacatcaaaaagggcgtgtattccccaactgccaagctgcctaccgaaaacgagctttgcaccaagtataacgtcagccgcatcaccgtcaggaaagccattctcgatttagtcgaagaaggctatctgatcaggcagcagggaaagggaacgttcgttaaaagccctaaattaaaacgagagctgatcgctgtaaacggctactcggaatttatggaatcaaccggcaaaaaaccgaagcatcatgtgctgtcccatgacatcattccagcgtcaaaacccatcgccgaaaagcttcaaatccaacccgagagccctgtggttgaattaaaacggattttatataatgatgatcagcctctcacctttgaagtgacgcattatccgcttgatttgtttcccggcattgatacctttattgctgacggcgtatccatgcatgatattttgaaacagcaatacaaagttgtacccacgcacaatacgaagctattaaacgttgtatatgcccaacaggaggaaagcaaatacctggattgtgatatcggggatgcgctgtttgaaattgataaaacggcttttacatcaaacgaccagccaatctattgctcattgtttttgatgcacacaaaccgtgtcacttttaccatcaacagcccctacacataacaggcataaaaaacgagacactgcttatagtattctcgttttttcactgcttcccccgtcctccaagcgataaggatagccatagccgaaagctccgtacacaccgcatgttttcgcagccgtttcggcggcctggcgcaaagcgtacgttatatcctgcttcacgcaaaaggcagtcaaaaagcctgctataaaagaatctcccgctccaagtgtatctattatatcagcttccacaatcggctgatgatagactcgatcacccgcagacaggattgctccttggccccctcgggtcatacaaaccattttggctccgtacccatgagctgttttggcaagctcaccgcattccgactcactcaaatcgcttcctgaaaaaaacgcatacgtcacataaggacagaccctcctcaaataatcatcctcccgattggttgaaaaatcaaatgagacagggaccagcccgcacagctgcggaagatcgttctcaagcctgctgtacacgctcgtatgcagcagatcatgcccgctgataaaagatacatctttctcctgaaacgcgaggcgaagccgggactgaatgccgcctttatttgatctgacaaaaatgcggtccccctgttcatcaagggtgacaatcgccatcccgttttctccgtgcgcctggcggatataatctgcattgacctgctccagcttgagaacgttcaacagatgcgccgcggcttcgtcattgccgacgattccaatataggaagactcatgcccgagccgcttggcaagcacagcaacgtttaaggcatttcctcccgggtaaaatgtttcttgatcctggtagtaatctacaacattatctccaaccgcaatcaatttcatagcgcttcctcctttatccttttacactgccgcttgcaatcccgcggacaaaatatttctgcatcaataaaaatagaataataatcggcgcggctgaaatcgttaaccccgccagcaggacgccccagtctgtctgcagcgcgtctctgaactgcatcagcccggctggaatggtccgtaaattctcatcatctatgaaaataatcgcaaacataaactcattccatgtatggtaagccgtcaaaatgccggatgtcaccaaaatcggcacgctcattggtaagaaaattctgaaaaatactccaaaacttgtacacccatccaaataggccgcctcctccaattcttttgaaatagaaagaaaataagagcggatcaaaatgatggtgaatgggatccgataagccgcatacggcaggattaacgcccaatacgtattgtacaggccaagcgactgaataatagaataaagcggcacaagactgacctgcggcgtcagcatcaatccgccgagacatagcaccaagaagaatccttttcctttaaactcaaaccgggaaaggccatacgctgcccatgcactgataaagacagtgatcacacacgtcagcgccgtaacgatgacactgttcataaaataagaagaaatcccctggttccaggcggaaacaaaattttccggatgccacgatgacggcagcgaccagctgtgctcaaaaatatcgtcagagtttttaaaggcgctcatcaccatccagagaagcggataggcaatcgcaatcagataaagaaacagaaaaacccacacagacgtttctccgatataccattttcgtctaggcttatctttaacctcaatgtgctggtcaggcacaggctccaacctgaacgaatctgtcttcttctgaggcagcatcagttactcctcctttccggttttaaagaacttcatttgcatgagcgataatgcaagcgtaatgattaacacgacagtggcaatcgctgaggcgtagcccatcatatcctttgtaaaggcgcttttatataaaaacgtgctcaagacttctgacgcgtttcccggcccgccgcctgtcaaaatgtacggctcattaaagaccgtaaaggccccggtcagcgtcatgaccaccgcaacaaaagacatctctttcgtctggggaacagtaatatgaaaaaactgctgaattttacccgcgccgtcaagccgggccgcttcatacagttcatccggtattttttgaatcgacacaatgtacagcatcgcaatataaccgacagattgccactgggacacaaaaatgacagaaagcatagctgtgctgtcatccccgagccaggccctcgtcagctgatcaagaccgatggcctgaagcagctgattcaaaagccctgtctccggattgtaaataaaatcaaacaaaagcgcgatcacagtcattgagatgacaaccggcaaaaagaaaacggtacgaaaaaacggcgaccattttctgaccagcttatcctcaagcaccgccgccaaaatcaaaccgccaaatacctggcatacaattgagatcactgcataaagcacattattggtaagtgcctgatagaagacaggatcatgaaataattcaacatagttttttaagccgataaacgttttttccggagaaaatgagctccactgaaacaggctgaggaatacattctcaaaaatcgggatataaacgaaaagtaaaaaaacgagagcgggcaccaaaaacaaataggggattattttattctgattgaccaagggtatctcatctcctttataaaaagaaaaggtgcgaagcttcaccttttctttgatttattcagctgacgccctcacctgctttgctgccttttgaacggctttcatcacctgctgcggtgtcatgtcgccgccaagcatttgctggacgccagttaggtacgcatctgcgacttcaacatcgacatccatatcaaaccatggaaccattgatttggcatcaacaatatgctgaacggcttcacgctgaatggctgttgcattttcttcagtagccgtaccttgcactgcactgtatttcccgacatctttcacgagcttttcgcccattcttttcgacgtcaagaactgcaaaaattccatcgcttccttcggatgttttgttcttgaggaaatcatgaatccttccggcgctcccgttaacgcttctgaagatcctttctgcccgctaatttcaggaaatgggaacatcccgagattaaccggttcaaccagcttgatttccgctgtttccgcatatatcatcgccgactttccgctcttaaattgctgtctcacatattcgtggtcgacggagtttacatgtttattaaagtaaggcatcagctcttgaagcttttcaagtgcttttacgtagccttcatcagtaaattcacccgttttggcgttatagtccttttcccgtgttttttcatcgaccatccgctgattaagcgtgccgatatagtgcgagattgtccaagtcgcctttgttccgaagctgatcggtgtgtagccatgttctttcagcttttttgacacatcgattaattcatcccacgtcttcggggatcaagattcagcttttggaaaatgtctttattatagaagaatgatttagcgtccatttgccacggcacgccatattgcttgttttcataagtaaatggtgtaatttgcgattgaacgagctgtgatgaccaatcggtgtcatttttgtagtaggacgagagatcaagtgctttattgcctctgataaatttaaaagcaaactcatcgctccaagagaagtaaatgtcaggagggctggtggttcccagcatgaccttaattttatctttataggagtcatttaaaacggcttcaatttgtatatcgatatctgggtgttctttttcaaattccttaacaacctcttcaaaataacttttttccggctccttcggccatctgtggaaaaatttcaatgtcacctttccgtccgctgaactgctttggctcgaacagcctgcaatggtgaacatactgacagctgcaatgatcaagaacaacaacattttcttcaaagggttggcctcctctggacattagactataatgttatataacattatagtctaatgcataatggttcctcattttcagatcaatactcaactttccacatgtatcttctatgagataaaggatgatttctcgcctctgccagctcgtctgcatagcttctcagcacacgattgagaacgagcggagcaagatagcctttaactgaatcgtcaattgcagtgaagtcgtaagatgcagcatcaagcacagtgagctttttgccatactttttcgagaaggtaagcgctcgctcttcaagaggtcttgtttcatctaaaccgagcaggatgataaacggcacggattcatcaataatttcaaacggtccgtgaaaatattctccggcatgaatggcgtgggaatgaatccattgcatttccatgagaatgcagatgctgtaggagtaagcgacaccgtagtttgcaccgcttgccatggtataaataatactttctttttcatgggcttttgcaaattgcttggcgttgtcagcttcctgcttaagggctttttcatatacagcctgcaattgatctaagccttcaattgcttgttggaatttcgtattgttttctaatacttgcagggttccaaaaacgatttgatacaaaacgccatagtttgtattgatcgcaagcgcctcatcaccccaatcgtactgggcaacatattgcgcttcctgcgctaaaggagactccggtttaaacgtcatcgcaatcgtaagtgcgcccttgccccttgcaaacgcagcagctttgactgtctccggggtatttcccgaatgcgagcacaaaataacaagagacttttcaccaagctgaacagggttgcgctgaataaattcgttggcgctgtagaggtcggagtttattgattttgactctctgtcaaacacatacttactcggatacataatggcagaagaccctccgcatgcgacaaagaatacatgatcaatggttttccctttcaaatcctgcaagaaagcttgaacctcacgatttacttttgctgtggcctgactcaaatccttcactccccgtttttattatataacgttatataacattatatattgttatattaaagtccgcgggtaggattgtcaatattattttctgaaatttctcaataatttattcgaatgacagacaaagggtcaataagcgaaaaaatgcccaaatcaaaagccagaacttgacttaagctctggcttcgctgttcaatccgcagactgacgtcttatttaaaaaataccttgtctatattgtacttcgagtgctgtgtattgatgatatatgtttcataaatctctctttccattggatcatcaactacacatacctcaattttataaacttcatctctgtgatgtttgatcggtgaaacagtgtcttcgaaatgcttcttaattctctgtcttaactttctggctttaccgacaaacagcagctcgtcatgaatgttgtaaaacataaaaatgccgcctttgtcccttgggatctggtgaaagtcgatgaatccgtgaatcggttttatcttcggctcgttatcattagctgactgctgtcgttcagtgatggtgacattcggtgcgggtatatcaatttttatcaaaatcagttcacgtcctctttttcattaaagataaatgctaacacatacagaaaagaaaagctagaacagctttattatatttgtttgttatgctcttgcttattatgcaagtgctccggctggatgataaggactaaggtctaattctgtctgctttccgagaactagctttgcgagctctgcacccaagaacggtcccatcgtcagtccagaagcacccaaaccgtttgcagcatataggccttgaacattcggcacggcccctacgaccggcagaaaacccggtgtaaacggcctgaagcccactcttgtttcaactgcagcggcatcagcaagacccggtgcaacggctaacgctttgctcaatacttcgtgcaggcctccggctgtcacacgaagatcatcaaggcctgcatcgttttcgtgtgtggcgccggctacaattctgccgttatcaaacgaaagaatgtactgatcactcggcggcattacaaccggccacgatcctgtatctgtatctgtcatttcaaaatgcataatctgcgctttttgaaatgacacttgaaaatgaatgccaagagacttcaatatctcattggcccatgctcccgccgtcacaatgaccgcgtcagccgcaaactgctttgcatctgtttgcacgccgttgactgttccgttttcaaaaagcaaagacgcatttcctttgatgaccgttgcgccgcgtttctctgcagcgcttaaaagcgaccggcacagcgctcttccgttcacacgggcggcaccgctgatatgaaccgattcatagccgtcagctaaaatcggaaacagctttttcgtttcacttgcagacaagcgggtaatgtcgccgatttccggcgcatcctcccgtctcttatacgccctttcctccattttatcgagtttagacgcgtccgtatgaatgctgatggcaccgacacgtttgtatcctgtatccgtttcaccgtctttttccaattgatggattaaatccttatagtaccgggctccccccttagcaagctggtaccaatcctgattacggcgttgcgagagccatggacagacgatccccgccgccgcatcagtcgcttgtcccggctctttccgatcaatgacagtaacgcgagcgcctgattttgcgagatgataagccgtcgacgcgcccagaatccctgcgccgacgatgatgtacgatttcatatgcaaacaccttttctattataatgtctattcattttaccaaatcgaatgctttccttcgaccttttgccctaatgtggaaaaaccgcgaagttcgtccaatctctttactctcctatcgaatatcctgtcactatcaatagagaaaggatgataccatgagcgaaaatcgtcatgaaaatgaagaaaacagacgcgatgcggcagtcgcaaaagtccaaaacagcggtaatgcaaaagtcgtggtcagcgtgaatacagatcaggatcaggatcaggcacaggcgcagtcacaagacggagaagactaatgaacgaaaacatcattcctctcaacagacatactcaagagatacccactactgaatctgttatcaaaaacagcggcaactcagaggtccatatcgacattcacattgatacaatgccaattgcttttgctatattatgctctgcattagccgcaaagcagatgacaaaagaggaattcgatatggcttatactcaattgcgagagatgaacagagaaaataacagcagatcatctgtaaagcaaattatcaatcaggagacagaagaagagtaaaaaaccgcggcccctcggccagcggtttttcttctgcatacaaaaaggacgcgactgaaaaccagtcgcgtcctttttataaaaaaataatcgattgaaccttccatttcgaacttgattatttttataaaatggtacggaatgatttataaaagggtcacccaaacccttgatttaaagccatttcttcagatggtttaaatgatgataatcttaacttggcaccgtgttggcatgagctgaagccgcatgatataagggtttacagtaataattcacggttgccgccgtgagtaagtttcatatcttttgaaagttattattgaagtaatgcacctgttagttgaactattccacggcttatttaaactgtactaatcttttgaaatagaaataccgttctcaataaaatgctttattcatatttaaatttttgaggctactaggcatacatccaaaccaagttttgaccctgagcgtaaactagttaaaagtctaattgcaataaggagtgaacctcgaataatggtatatcaaagacaaatgacaccctatgccctgaatccccgggatttacaaaattgtttgtatcgtttcacgtatttgtggcttagaaataatgataatttctggtatttcttaacggctatcggagaatcaagagtttatggatataggtttttcggtggaagatggaataattattccgttgatttaagagatattgtttccttctattgttctcctccgactccaactctatattaaaacactgagcctgatatttgcatatgaagaaaatatttgtgaattaaaaaaggtcaaagcaaaatgaattgaatcttgaaatatccaggattcaaaaaaacaaagatgtaatcattttctaaaattacaataggcactatcttacacattcgaaactatcacaagcttcaggggttgaatatagaggcttacacgctttcagacacggttggacactagaacactaaaacaataagtgaaaaatattcacacataactgaaaaaatcgaacaagatgagcttgcaaaatttgcttcttactcaacaagataacaaaaagcttggcataaaaattggcacaatagaaacttggcatatgtcgaaaataagaaaaacccttgataaacaagggtttttcgttagttatccaatagaaccttccatttcgaacttaatcaaacggttcatttcaactgcgtattccattggaagctcttttgtgaatggctcgatgaagcccattacgatcatttcagttgcttcttcttcagaaataccgcggctcatcaagtagaagagctgctcttcagatactttagacactttcgcttcgtgctccaatgaaatgttatcatttaagatttcattgtaaggaattgtgtctgaagttgatttgttatccataatgagcgtatcgcactcgatgttagagcgggcgccttccgctttgcgtccgaagtggacgattccgcggtacgttacttttccgccctgttttgaaatcgattttgatacgattgtagatgatgtgtttggtgcaaggtgaatcattttcgcacctgcatcctgatgctggcctttacccgcaagagcgatagaaagcgtcataccgcgcgcgccttcgccttttaggatacaagccggatatttcattgtcagcttagaaccgatgttgccgtcgatccattccattgttgcgttttcttcacagactgtacgctttgttacaaggttgtaaacgttgttcgcccagttttggatcgttgtataacggcagtagccgccttttttcacgatgatctcaacgaccgcactgtgaagtgagtttgttgtgtaaacaggcgcagtacagccttcaacataatgaacgcttgcttcttcgtcaacaatgatcagtgtacgttcgaactgacccatgttctcagagttgatacggaagtaagcttgtagcggtgtttcaaccttcacgcctttaggcacgtagatgaaagaaccgccggaccaaacagctgagttaagcgccgcaaacttgttatcagtcggcgggattacttttgcccagtgctcacggaaaatatcttcattctctttcagcgcgctgtcagtgtctttaaagacgatgccttgtgcttcaagatcttctttcatgttgtggtatacaacctcagattcgtactgagcagaaacacccgcaaggtatttttgttcagcttcaggaataccgagcttgtcgaatgtttgtttaatttcttcaggaacttcatcccaagaacgctctgaacgctcagacggttttacgtagtacgtaatttcgtcaaagttcagtgagtttaaatctccgccccattgaggcatcggcatattgtagaaatgctcaagtgatttcaagcggaagtcaagcatccattgaggctcttctttcatgcgagaaatttcttctacgatttcttttgtcaatccgcgctctgaacggaaaatggaaacgtccttgtcgtgaaaaccatacttgtattcaccaatatcaggcatttttttagccatccattttcactccaatccttttaattgccgccttcttctttcgcgactcctttttcaagtgctttccatgacagggttgcacatttgatacgggcagggaattttgaaacgccttgaagggcttcaatatccccgagatctatagaatcatcatactctttcccttgcatcatatccgagaaaatcttagacatggaaagggcagtttcaatatctttccctttaatcgcctgagtcatcatcgaagcggatgccattgaaatggaacagccttccccttcaaacttcgcatcttccacgatgtctccgtcaagcttcattgtcagtctgatgcggtcgccgcatgtcggattgttcatatccacgacaatgctgtcattcaaaacccctttatttcgcgggtttttgtaatgatccataatcacctgtctgtacaatgtatctaagtttgcattaaaagacatttgtaaaatactcctttgtcttttgaagagcttccacaagcttatcaatctcttcctctgtattatacagataaaagcttgctcttgcagtagcagttacatccagccatttcatcagcggctgcgcacaatggtggccggctctgactgcgattccctccgcatcaagcacagtcgccacatcgtgcggatgaacatcatcaaggttaaatgtgacaagcccggcacgctcttccggcccgtaaaccgttacgccgtcaagctggcggaagcgttcaagcgcataagctgcaagcttgtgctcatggcgggaaatctcatcaagaccgatttcttcgagaaaatcaatggcggcaccgaggccgattgctcctgcaataatcggagtacccgcttcgaatttccacggaagctctttccaagttgattcataaagcccgacaaagtcgatcatttcaccgccgaattcggcaggctccatgttttccagcagggctttctttccgtacagcacaccaacaccagtaggtccgcacattttatgggaagaaagcgcaaagaagtcgcaatcgagatcctgcacgtcaattttcatgtgaggcgtgctttgtgcaccgtccaccacaatgacagccccattgtcatgagcgattttcgccatttctttaatcgggttgaccgtgccgagaacattagatacatgagacaccgcaacaatttttgtgttgcttgtgaccgtttctctgacgtcttctaaagaaatcgttccgtcttcctgcagcggaatatattttaatgtggcgccagttgcttttacagcctgctgccacggaatgatattcgcatgatgctccatgtaggtgatgaccacttcatcaccaggtttcaggttggcgcgcgcatagcttaacgccaccatattcagtgatgtggtcgtgccttttgtgaaaataatctcagccattgacttcgcgttaataaactttcggactttttcacgcgctccttcataaccatctgtcgctctggttccaagtgtatggacgccccggtgaacattggaattgtattggttataatacttatccagtgtttcaatgacagcacgcggcttctgggaagtcgccgcgctgtcgagataaacgagatcatgtccgttcacttgctgatgaaggatcgggaactgttcacgaatatctgtgatattcattacttcactttcctttcgataacagaaactaattgtttcttaacgccttcaatcggaagttcatttactaccggtgcaaggaatccgtaaatgactaagcgttctgcttcttctttcggaattccgcggctcatcaggtagtaaagctgaatagggtccacacggccgacagatgccgcatgtcctgcagttacatcgtcttcgtcaattaaaagaatagggtttgcgtctccgcgtgctttttcgctgagcatcagcacgcgtgattcttgctccgcattcgctttagaagcgccatgttcgattttgccgattccgttaaagatagaagaagcggaatccttcatcacaccgtgcttcaagatatagccttcagaagctttaccgaagtggatgatttgtgttgtgaagttttctgtttgctctcctcttccgacaacaaccgttttcgtatcgccgtatgtgccgtcaccgtaaaggtttgttgtattttcggaaatcgtgtcgccgtcgttcatcaggccaagagcccactcgattttgctgtcgcgtccgcgcgcagcaccgcggcggttcacataagttgtcacaccgcttgacagattatccaccgcaccgtatgtcacgctggcattatcacctgtgatgacctcactgataatattgaagacagcgtctttcgggtttacagtgctgatgtagttttctacatatgttacagagctgtggtcttcagccacaatcagcacgtggttgaatagagctgtatcattgctttcgtggacataaacagcctgaaccggcgtctccacctgaacatttttcggaacataaaggaatgctcctccgttaacaagagccgcgtgaagtgcagttaacttatgttcgtcaaccttcacgccgtccttcataaagtatttctccaccaagtcgctgtgctcgcgtgcagcagtcagaatatcagtgaagatgacgcctttgtctttcaattcttgagaaagagaaagatgtgccggcgtctggtcacgctgtacgtataatgttttatcttcgttttcaatgtcgatcagcgcttttacttcatcagtcaaatcttctaatgaagaaagcggttcgttatccactgtatgcttcgcgaaattcgtgaagttccagtttgtgatttttgttttgtcaggtttcggcatcggcagatcctcagcttgttcaagagcctgtaagcgcaggttcttcagccaggcaggttcttggtgcttttcggaaaagcttttgagatactcctgatctacggatagttttgtacctagtgtcatattaatccccctaacgcttacgcttcttggccaacagtttcgtcttcaatgccaagttcttgtttgatccagtcataaccttctgcttcaagacgctgtgcaagctctgcaccgccggattttacaacgcggccttgcatcataacgtgaacaacatccggagtgatgtagtttaacaggcgctgatagtgagtgatcatcaggcagccgaagttttcgctgcgcattttgttgatcccttttgatacaactttcaaagcgtcaatatcaagacctgagtcaatttcatcaaggatggcgattttcggttcaatcatcattaattgaaggatttcgttgcgttttttctccccgcctgagaagccttcgttaagatagcgctgagccatttcagggtccatttcaaggaactccatgttttcgtccattttgcggatgaatttcatgagagaaatttcatcgccttcttctctgcgcgcgttgattgctgagcgaaggaagtcggcatttgtcacaccgctgatttcacttgggtactgcatcgcaaggaataagcctgcctgcgcacgctcgtccacttccatctccagtacatctttgccgtcaagcgtgatgctgccttttgttacttcatatttaggatgccccataatagcagctgataaagtggatttaccagttccgttcgggcccattactgcgtggaattctccaccttttatttcaaggtttacaccctttaagatctctttcccttcgatttcaacgtgaagatctttgatcgttaatgttgaagcagccatatctatacctccaaaaatatataatcattattctcattttattctcattctaattttataacaaatgaaaagtaaatacaactttttatcgtgccttgcacattcctcaagtttaacaaagatcagcactttattaaagcgattgaaaaagaaaaagagtggattcccacccttttttaaaagattgattttctcaataagctcccgcagaaatccgcttgcttttttcgtaatcaagctctctctgccgctctactttcattcttgtttccagccggcgtccatattcctcgtatccaattccgtgtgacagctgcatcgctttttccatttctgacgtataatcgaggttcagtctgtcctggctactgcaaataatgaatcaatcccttcatatatttgctttttattgtaccagtgctgcgttggatgccgcaaaaacgatttggcgtgaaatagcggcagatgagacgaaagcatcctttcagaacaaatgagaatggtttttcggaatattccttctcttaatgcgtggtgtttccgaattcctcaatgcactgttgaacgactgtcacgccttggctgaaagctgcgccgcctccaaatgccgctgccacactgacggcttcgagaatgttttcttctgtcgctccctgatcgagacagccttttgtatgatagatcatgcaatattcgtcctgagcattgatggcaattccgagggcgatcagctgtttttctctttcagtcagagaattcccggcaaagcactgttcagtaaattcgttaaattttcttcccatcagcggcatcttttgttcaaatgtgcctaaaccatgtttatattgttttaacgcgtcctgcatgcttcctctgtcttgattcaaagaaaatccctccatctgtttaacattcctttttattatgaacagcttttaggaaaatacgcgaaaaaaccccggaattctcatccggggtttcagtcttattcagatacaggaagcacagctccgtcgtattttttctcgatgaagtctttgatctttttagagtgaagaacttccatcagcgctttgatttttgcagaatcttcttcgccttttcttactgcgatgatgttagcgtatgggttgtttttcgttgattctacttcaattgcgtcttttttaggatttaatttattttggatcgcatagtttacattgatgaagaccgcgtctccttctttgttttcatatgcttttgccgttaattcaggcgctactttttcgaattcaagatttttcgggtttttcttaatgtctttcaatgttgcgtcaactgtttccactttagaatcaagagtgattaatccagcgttttcaagcattgcaagcatacgtccttgttcagcaacgttgtttgtcagaatgattgtcgcaccgtctggaaggtctttcagtgatttgtatgttttagagtaaataccgaatggctctaagtgaacagcgccggcattcacaagtttgtaatctgtgttttctttcatttcttgctcaaggtaaggaatgtgctggaagtagttcgcgtccacttctttatcagctaaagctttattgtacattttgtaatcactaagcactttcactttcagcgtatagcctttttctttcagcaatggttcagcttcttttaaaatttctgcatgcggtgttttcgttgccgcaacgacaatttctttcttgccggattcagcgccgttattcgaaccgcaggcagccataactcctgcaaatacaagcagtaatgcacccaaaaatagctttttcaatgtaaatcctcccttatcgtttgtctataatatttgttattagatcaccgatgatttgaataataaacacgatgattaaaataaacacagtagcaacgaaggtaacatcagcgttattagactgatatccttctacgtacgcaaggtttccaaggcctcctgaaccaatggctccggcaattgccgttgagccgatcaaagcgatggctgtaaccgtaatgccagaaataagagcaggcattgattccggaatcagcactttgaaaataatcgtagacgttttcgcgcccattgatttagctgcttcaatcacacctttatccacctcacgcaacgcgatttcaacaaggcgcgcgtaaaatggtgccgagccgattaccagcgccggcaatgcggcgtttggccctaagatcgtgccgactaaaaatttcgtaaaacctaatagtaaaataattaaaataaggaacggaatcgatctgaatatgttaacaacggccgcaatcactgagttgaccgctttattctgccagaggcttcctttgctcgtcagaaagagcagcaagccgaggatgaccccgatgacaaaagcaaacagtaaagaaatcagcgtcatataaagtgtttcatatgtcgcgttccataattcagttaaatcaacgttcgggaagtatttttcaaacattcgtgatcacctctgctttcacctgtttgtcattaatgaaacggatcacgttttgcacttcttcctcgtccccgtcaatgtggatgaacagtgaaccgtaagccccatccttcgtctgcgaaattttcccttgcagaatattgacgctgacattgaagtttctgatcatctctgtaatcagaggctgttcagctgactcaccgacaaatgtgagctgaaccatttttcctgatgctgtatcatcaagaaggtgctgaagcgtctctttcgtttcttccggctctgtcacctgctgaacaaatcgttttgtcatttgttcctttggatttttaaagacatcgagaacctcgccttcttcgaccaccttgccgttttccatgacggcgactctgttgcagattttgcggatgacatgcatttcgtgcgtaatcagcacaatcgtcaaaccgagtctttcattaatatcggacaatagatccagaattgaatctgtcgtttgcggatctaatgctgatgtcgcttcgtcacaaaggagaaccttcggattgtttgcaagcgctctggcaattccgacacgctgcttctgaccgccgctcagctgggacggatatgatttttcttttccttctaaacctaccagtttaatcagttcattggcgcgcttgatccgctcgctctttttcaccccggcaatttctaaaggaaacatgatattatctctgacagtccgcgaccaaagcaaattgaaatgctggaaaatcatactgatctcatggcgtgcttttcttaaaccgcgtccatttacttcattaattttggttcccgccacttccacggttcctgaggttggtttctcaaggccgttcagcagacggattaaggaactcttaccagctccgctatatcctataattccaaaaatctcaccttttttaatggaaagcgagacattttggacagcattgacatctccatgtttcgacttgtaaacttttgaaacatcctgaagattgatcaaagcaatcacctgccttaacactattctaagaaatcttccggttttttctgcaaaagaaaagcctttctgcacacttgagcagaaaggcttatataaaatgcctttctctcatctttcaaagctgaacgcttcgtgtgaattggcaccatttcaacagtgttgatggttgccgggcttcatagggcacttccctccacctctcttgataagagaaatatatagtctttttcgtccggaaattcttaatgtagaatagcacggcgaatgattaaatgtcaataaaataaatgatgtcaacttttactattataataatttattattttttaattttttaaaatcctctgaaaaaatccatttgtcagccagagaatggcttccagctttaacagggccctgaatgacccctttactttgaggcttccgctctgaatcaggtgctgaagggaaatgtctccgtgcaataaatcaataatttccgtttggtttccgtaaaaggtcaggttggacgtttggggcggagaaacttttttcatttctccctgttcgtttattgagacggttaaggcttctgcttctccttggaaggtaatgagcaatgttgaggcattcaaaaggggttttaaaaacagatgctgatactcatcctctaaaacttccgctttctccatatgtacaacctcctatttgttggtcatacatacacatttctctctttgtcgcaagaacccctttataaaacgaacgacaatttcataggatatgctgagaaatatgtcataaatgggatgcggaagatgatttttgtttgatcagctcatataaataagaaacggaatgaaatgcatatcctctttcgaccatctttccgcctttaaacagcagaaaacaagggacgctttcaatttgatacgcttttgcgaatgtcggagagtaattgacattgttttgatagaaggcgacatccggcagcatttctttcaccactgtcagcattttgcttgcaagctggcaggtgccgcaaaacggagtatataaatatagaaggtacacatcatcttcaatgtgatcaagttcgtgttcttggagttctttcatgctatacacctcgggactttctttcaagaaaaatagtatggacattcagattcgcacgcagtaatacagaagcgacatggtgcctgggagcagccgctacttccttataggctctgtcgatatggagatggcaggcttcattaaattcacgcttcagctgttttctcaatttctcacctgattcatcagcatcaactaatatatagacgtctttatcataaagctcgtcagccaattcctcgagcctcagctggctgattgttccgtttgtgcagataatgcgcaccggttcattcaggacgctttcgattttctctttatctgatttcccctcgacaatcataaccttttccagctcatccatcttcatcttgttcacctgccgcgtcaaatttgaaacgttcagattgtaaaagaaggcagtgaaattcaccgccaacattaacaccagccgttttcgtagtcacaatctacatattttgcgtcgtctccagagaccacatcggctgtcttataaaatttctcattttcaaaggaataaccggacttaagctcatattcattcatgcttgtcatttggccgatcatctcattatcatgatataacgagagccggccattttgaaagcggcctgtcacgtcattggtgacatcgagcttttgtttgtcgaaagccatattggacacctcccataacgttagcgtgtccaattgcttttacggctatcctgttttagtcttcttgtgtcatctcttcgtattgctctgctgtcatcagtttttcaatttcagaagcgtcagatggctcaacgacgatcatccatgctttttcgtacggagattcgttgacgaattccggactgtcatcaagatcttcgtttacttccacaaccgttccgttaatcggtgcataaagctcagataccgttttaacggattcaacactgccgaatggctcgtccgctttgatttcagcgcccacttcaggaagttcgacaaacacgatgtcgcctagttcggactgggcaaaatgcgtaattccgattctggctttttctccttcaacttttacccactcgtgttctcctgagtaacgcaaatcttttggtatgctcaattgaatccctccattttttacagcactacaataagaagataccacacttttcaaaaaaaatttacattaagcccagttttcttcaaattggtcttctttaaatccgacagtcactttttcaccgtctgttgtaagcgggcgtttgatcagcataccatctgaagccagcagctcgagctgttcgtcctctgacatgtgatacagcttttccttgagattgagctcgcggtatttcatgccgctcgtgttgaaaaatttcttgagatccagcccgcttttttcataaagcgcttttaattcttctttgcttggcggctgctcagcaatatgtatttcgtttatttctttcccatgctcttcaagccacttctttgctttgcggcacgttccgcatttagggtaccagtaaaaagttaacgacatcttcttccccctcaataaaataatcgaggttattttaacacagtttgttttaaaaacctaaaacagtgcttcttaaaaaagagctccgcgcatgcggagctcatggccaatcagacagtatatttctcagcctcaaaaatgcctgccgccgcctcgcgttttttctgaatcacgtttttaggcgttacgcgtgtcagcttgcgcagagcggaaagcatcatgcggagtgaatctccttcttccattgcgataagggattccttcgcatgcgcttcaatttcgttaaaggcctcttgaacgaaaatttctgtgtacagcaccttttgcgctgctttttcagcgccttgtgcggcaatggccttttccgttctgagcacggctgattccattgcgtatacattgctgacgatatccgctacgttcacgagaatttcttgctcacgatcgatcgcttttccgtatttttgcgcggctaggccggcagcaaacaacgcaatttttttggcttgcttgacgatatatttctcctgctctaagacgccgcttccaggctcttcaggcataagcatcatgagttcttcctgcagcgactgcgctttttcgaataaaggcagctcgcctttaagcgcttttttcaggaaggtgcttggcacgattaaccggttgatttcgtttgtgccttcaaaaatccgattgatccttgaatccctataggccctttctacttcgtattcctgcataaagccgtagcctccatgaatctgcacgccttcatcaacgatataatcaagcgtttcagagccgaataccttattcagagagcattcgatggcgtattccgcaatcgatttggcgatttgccggccgtccttgagatcttcggccgtgaactggctcatattgtcttcaaacagcccgacggttctgtatacagagctttccatcgcatacagccttgaggccattgtcccgattttttcctgtgtcaatgaaaaaccagcaatcggcgttttaaattggcggcgctgatttgcatatgccgcagacagctcgatgacgcgtttagatgcgccgattgtgccaaccgccagtttgtaacggccgatgtttaaaatattaaaggcgatgacatgccctttgccgatttctccgagcaggttttcctttggcacttcagcttgatccagaatgagggttcttgtcgatgatcccttgattcccattttcttttcttccggtcccgtggagacacccgggaactctttttctacaataaaggctgaaaacttgtcgccgtctatcttggcgtaaaccacaaatacatcggcaaaagcagagttggtaatccactgtttttcccctgttaatacataatgggttcctgcttcattcagcacagctgttgtttttgctccaagtgcatcagatccagagccaggctcagtcagagcataagcggcgatcttttcgcctgaagcgagtccaggcaaatattttttcttttgttcttctgatccgaaaaagacgatcggcaaggaaccgataccgacatgcgcgccataagaaagagaaaagcttcccgcacgcgaaaatttctcagtgatgagtgccgagctgattttatctaggccgagcccgccgtattcttccggcacatcggcaccaagcagccctagttcgcccgctttcttcaacagtctgacagaatgctcgaattgatggttttcgatatcatctatatgagggagaacatcttgctcgatgtaatcctctgttgttttcgcaatcattttatgctcgtcagtgaaatcctccggtgtatacatttgatcgtatgtgacatcctcgattaaaaatccgccgcctttttgtacgtcagccgctttttttgccatttgtttttccccctttagcataattcaaatacaccggccgctcccattccgccgccgatacacatggtcacgactccaaattgctcgtttctccgtttcatttcatggatgagtgagagtgtaagctttgtgcccgtacagccaagcgggtgtccaagcgcgattgcgcccccgttgacattcactttttcttcatcaattcccaattccctgattacttgaatggcctgtgaggcaaaagcttcattcagttcaaacaagccgatgtcctgcagctgaagtccggcaagcttcaaagcgcgcggaatcgcttccaccggtccgattcccatgacttccggcggcacgccgcctactgcaaaggaacggaatttcacaagcggcgccaggccaagagcatcggctttttcccggtccatcagcatgacagccgccgctccgtcacttgtctgcgaggaattgcccgcagtcaccgtcccatcaacggaaaaggccgggcgcaatgtcgataagatgtctgcagtcgtttgcgggcgaacaccttcatcctgagaaaacacaaactgtttttccataggcttatggtcttctccgatttctgtcaccgtcacttctacgggtacaatttcatctttaaattttccttctgcaagggctttagcagcgttttggtggctgcgaacggcaaacgcgtcttgatcctcacgggagacgccgtattttttcgcgacttgctcggctgtgtggcccatgctcatataatattccggtgccttttctgccaaagcaaggttcggacgggtaacatgccccatcatcggaacttgcgacatggattctgctccgccggcgatcgctgtatcgtaggcgcccagcataattttttctgctgcatatgcaatagactgaaggcctgaagagcaataacggttaactgtaatcgccggaaccgtgtacggcaggcccgcgagcgcaccgatatttctcgccatattaagcccctgctccgcttcaggcgttgcacagccaataatcaaatcgtcaatattgccttcgtaaccgcctgcccgtttcagtgtctcttttacacaaatcgctcccaaatcatccgggcgaacggtggccaacgatcctttttttgcttttccaaccggtgttcttgcacctgacacaatgactgcctctttcataagctccctcctaattccgtaaaggtttacctttcacaagcatatgctgcattctcgcttgagattttgcctctcctgacaaactcaaaaacgcttctctttcgatctccaataaatactcttcatcaacctctgtaccaaacggcacttttccgcccgcaatgacataagcgagttttttcgcgatcttaaaatcatgctcagatatatagccggacagcttcatctgctcagcgccaagcaagagtgccgcataaccggtttctcccggcaccttgaccttttcttttacaggcggccgccagccggtatcgtataaagatgcggccagctgcttcgcatcgtataacaggtggtcttgattcacgctgatctgatccgtttcttttaagatgttcatctcacgagcctcttgagcggaagcggacactttcgccatcgcgattgtttcaaatgttttcattgccgcattcatcggatcatggccgcggcgaagatggttgatgtacagctctttgttacctcctccgccagggatgaggccgacaccggattccacaagtcccatataggcttcgcttgccgcttgaatgcgcgccgccggcaggcatgcttccgttcctccgccgagcgtcatgccaaatggcgcggcgacgaccggtttcgcactgtatttgatcttcatcatcgtctcctgaaaacggcggatcacaaaatcaacttccaaaaagttgtcatcttggacttccattaagatcatggcgagattcgcgccgacgcagaaatttttcccttggttgccgatgacaagccccttgtaattccgttctgtttcctctaatcctttgtggatcatttgaatgatatcgaggccgatcgcattgcttttcgaatgaaattcaagaagggccacatcatctccaaggtcaattaagcttgctccgctgtttttcgcaatcacgccttttgtttctttaagtgcttgtaaatgaattcgttttttattttctttcacggctctgtattcgccgcggtcataataaaataccgttccgttctctttgatgtagaaggtttcatttcctttgtccagcatctcttttatccagccaggcatatctgctccaagctgctcaagcttttccgctgactgcttgaggccgatggcgtcccacatctcaaaaggtcccagttcccagccgaatccccacttcatggcttggtcaatcgcatgaatatcatcggcaatctcgccaagcagctcggctgagtaaagcagggtttgagaagtgatattccacagcaaacggccggccctgtcatccgaataaataagcgctttcattttggcttttgtcccttttgcctgttttgccgcttcaagtgccggtgatttcatttttgtccgctcgccgtaagtaagcgtcactgggtcaagctcataaatcgtttttccttcttttttataaaagccttggccggccttgcttccgatccaccctttttccagcatatcgttcatgaagcttggaaggcgaaacacttctttttcatcgccatcagctttgtcatacacatttcgggcaacgtgggcgaatgtatcgaggccgaccacatcaagcgttctaaaggtggcgcttttcggcctgccgatcagcggtcctgtgatcgaatcaacctccccgacctgataaccgcctttcagcatttcttggactgtcacgagaagcccgtaagtcccgatgcggtttgcgataaagttcggtgtgtcctttgctgtaacaacgcctttcccgaggacattttctccgaaagctgtcataaactttaaaatatcaggatccgtttccttaatcggaatgatctctagcagctttaaatagcgtgcgggattaaaaaaatgcgttccgagaaaatgggctttaaaatcatccgaccggccttcagccatttcctgcactgatatgccggatgtgttgcttgagacgatgcttccagtctttcgatgttcatccacaagagcgaaaattttctttttgacttcaaggttttcgacaacgacctcaataatccaatctgcttctttcagtttttctgcatcatcctccagattgcccggtgtaatataggaggtatttttcgctgatgtgaggggagcgggcttttgtttcagcagttttttcaccgcctgccggctcagcctgctgcgcatctccggactgtccttcgtcagcccccttttttcctcttcctttgtcaaatcgttcggcacaatatctagcagcaggacaggaattccgatgttagccaaatgcgccgctatcccggaacccattacccccgatcctaaaacggctgccttccgaatgtgtttgtgcatgagatatcccccttgaacattgaatgaatagtcattcattttttgaccaaaaaaaatgaaacccgtttcttctttcatcttaaaagatttccggttcgacttcaatagctaatttgttatttttttgtatgaagcctataaaagtcgggcaacttaagcccggaggtgaagggaatggtacgagagaaaaaaaatccgtcttcagcggcagtcagcgcggcgagcgtaaagggagatgccggtccgactcagcattacggcggcggaaaactgacaagtcaaaatcagcagtataaaaaacataacatggaacaatcataatgcagctgcttcccgcggctgctttcactttttcaaaattccttttaacacaaacgctgcattggcaggccgctcggcaattcttctcataaagtagctgaaccagtccgttccatatgggacatacacacgcattctgtagccttccttggcgagttccttctgacgctccggcctgatgccgtatagcatttgaaactcaaattgcgacgcggggatttgatgttcggtgacaagctgtttcgtaaatgcaatgatgtcatcgtcatgtgtggcgacagccgtgtagttcccgcttaacaactgcagctttattaagctctgaaaatgaaggtccgttcctcttttgtcgggaaacgctacagccgcagattctttataagcgccttttacaagtctgagattcggctttaagtcccgcatctttctgatatcttctgccgcccggtacagatacgcctgaatgaccgtgccgagcttctcaaattcctgtttgcattgcctgtaaatagaaagtgtctgttcataatgagtatagtcttccatatcaatggtcacagcaacatcatattgcttcgcaacggaaagaatggcgcgcaaatgagtaagagcaagttcttctgaaagatcgagcccgattgaggtcagcttaagtgaaagctctgaattcaattgatgttcggcaatggcttgaatggctttcttgcattcctctgcgacttggtttgcttctttttccgaagctgcatactcgcctaaataatcaattgttgcacacaaaccggatctgtttagccttttgacggtcttaaccgccgattcaatcgtatcccctgcgacaaaccttcgtgctccaagccgcgttccgtatgcttttgcgaacttggtaagtgttttattttgagataagaataaaaacacatgtctcagcatccgactccctcccgccgtcatcttcaaaacacctgtatataactcccagtctgaaggaaactataaaatgaacagaaaccaaaggaggatcacaatggataatcagcagcaatctcaaatgccgccttccgttatttcgacaaaggatcatttgtatctcaatgacatgctgaactggaatttgctcgcgatgaagaaagcgcatttcatggcgcagcagtgccaggatcaaacgttaaagcaagaactcgaccgcgtcggacacatgcatcatgatcactatcaaagaatattaaagcacctgcagccaggccagcagcagtccggctacatccaataaggaggcgccagaatgaatcagcaaaatcaaaaaatcagcaacccgcagacacctgtaccgacaacatcggaaatgaatgacagagatttcgtcaacgaattgctgacaaccgaaaaatacatgacaacagcttattgcactgctttgcacgaattcagccacgagtctctttatcaggatattcaatccatttttgatgagtcacaaaaagcgcaaagaaaactatatgatctcatgtttcaatatggatggtattctgttgaagcggaggatgcacaaaagctgcagcagtcctatcaaaaattccagcagaccattcagcagcagtctccttatcagcaataacaacattagtaaaaaggatacgatgttctttagggcatctatcctttttttgtgtaaaatcagttgacttttcatttacgcttatttatatttaataagcattaactattttgtcattaaaatatatatacagtgtatgtaacagaggggaaatgaatatgaagagtgcggatcagttaatgtccgatattcaattatcgcttcaggcgctctttcaaaagatacagcctgaaatgctggaaagcatggagaaacaaggtgtcaccccagcacagctgtttgtgctggccagcctaaagaaacacggcagcctcaaaatttctgaaattgccgagcgtatggaggtgaagccaagcgcggtgacgctgatggcagatcgccttgaacaaaaaaatcttatcgccagaacacacaacacaaaagacaggcgagtgattgatctcagtcttactgacgaaggagacagaaagttcgaggaggttttggcaggcagaaaggccattatggcgcgctatctttcctttttgacgaaggaggagatgcggcaggcggcgcatattacagcaaagctcgcacaagcagcagaaacggatgaaaagcaaaacatgaaaagaggaaacggatgaaaatgagtaaagaaggcaaacaatcaaaacgaacgttattaataacaggcttaattattgccatgtttttttcagcccttgacggtaccattgtcggaacggccatgccgaaaattgtcggtgatctgggcggtttgagcatgatgacctggctgacaactgcatatttgttaacatcaacaaccattgttccaattgccggtaaactggctgatttattgggacgccgcattgtctatgtatcaggtttaattattttcatggctgcttctgctttgtgcggaatggccaacaacatgacagaattgattatcttccgtggactgcagggaatcggcggaggcatcatgatgccgatggcgatgattgttatcggtgacttgttcacaggaaaacagcgtgctaaattccaaggtgtctttggcgcgatttacgggctggcttcagtgattgggccgcaaatcggcggctggattgtagactcgttaaactggaaatgggttttctatattaacctgccagtcggaattattgcggttatttttattgccagaggattacagggacgccagcagactggtccgatcaacttcgatatcgctggtattttcacaatgattgtcggtgtggtcagcctcctgctcgccttaagctttggtggaaaagattatgcatgggattcatggcagattcttgggttgttcgctctcgcactgatcggcattgtcagctttatcatcgtagaatcaaaagcaaaagagccaatcctgccaatgtatttatttaaaaacagaacatttacatttctaaacttgatcggcttctttatgagtatcggtatgtttggcgccattacgtttgttcctttctttatgcagggaattgtcggtgtaagtgcgtctgaatcgggtacaattatgacaccgatgatgatttctatgattattacaagtatcatcggcggacagcttgtttataaaatcgggattaaaccgcaaatcattgcaggcatgctggttatggccggcggattcctgctgttaacgaccttggatctcgacacgagcaagcttgtcgctacatcttttatggcgattattggtctgggaatgggtcttgttatgccgattctgacattggctttacaggaaagcttttcgaaggaggagcttggagttgtcacttcatccagccaattcttccgttctatcggcggaacattcggcattaccatgctgggagccgtaatgaatgcgagatcaggaaatctattaacagataaattggttccatatttagactctcttccggcacaggcaagctcgtttgccgcccagctaaagggtatgattgatacaaatccgcaagggctgctgcaatcactgttcagtccggacgcggtcaaacaaatccctgcggctttctcatcccatattgtgccgattttaaaaacatcgttgatggattcgctccacagcgtgttttatacgggcctgatctttatcgcagtcggagccgtattcaccttgttcttaaaacctatcaagctatcaaataagaaagcggaagaccaacaagaaaaagagaaggcggcaaaagccgttgaatcaccttcccattaatagagcaccccgcgggtatcaatccgcggggttttttattcaatcatctgggctcttccatttccgaaagaccaatcctcagcctgatttccggccagcatgataaacacatcttcttttcttacaccaagctcggaatgaatccggctcgcgattgagcggtaaagtgcttttttctgttcagttgttcttgactgtttcagtgtaaaatgaatgtatatcagttcatcagtacgctcgacttggagataaaatggatcataaaaaaattcgcttttttcatattgtctgatgacttggaaatagtcatcttccggcacattgatttcttcaatcatcgattggtggatagtcctgctcagtttttgaagccacacttcgcttcttcccgaccgtaaatgaatctgtacaaatggcatctccccgcatccctttctttacagcgtctgtccgctgtcaattgtgataatttggcctgtgagtgattcctgttcaattagtgaacaaatcaatttggcaacatcatctggttcagcaatacactgcagcggcaaagagccgatcatgcttttcattttttcttcccgtccggcccaccatctcgttgccacagctcctggtgctacaccgctcactctgatttcaggcgctaaggcgtgggccaatgatttcgttaaaccgtgcaccgctgattttgatactgcgtaaggcatagatgagccgacaccagttatccctgcgatgctgccgacgtttacgatcgccccggccttgcttttcttcatgaacggtaccactgctctcgcgcaaaaaaacatccctttcacattgacggcatacagctcatcccagacgtcttctgtcgcagcctcaagatcatccattggaatatgccgtgtaatgcttgcattgttgactaaaatatcaaccgtgccgtgtgtgctcacgattgcttgaatcatatcctgcacgtcgctgtttttggatacatctgcttggatggcgaaggcttgcccgccagctttttgaatcttttccactgtttcctccgcttctgattgcgagcgtgaataattcaccgccacaatcgtcccgcgctttgccaattccatactggctgcttttccgattcctgtgccgccccccgttacgagagctattttgttcaagacattcattgccgccactccttgctgttgactaaagtatatttctgattccattgtaatccagctttgatgttacgtataatgattgttaaagatactagatatcactcagattgatagtaaacgaacggaggagttcaaaatggaaagcggagatttacgtgtgtttcaaatggtagctcgtgaagggagcattacgaaagcagccctgcagcttggctatgtacaatcgaatgtcacggccagaattcaacaattggaagctgagctgggtaccacactgtttttgcgccataatcggggcatgacactttctgcaagcggaaaattgctgctggactacgcaaataaaattataggccttcttgatgaagcgtctaaagcgctctcatcctccgcagaaccaagcgggccgcttatgatcggctccactcagacaaccgccgcggtaaggcttccaaagcttctggcatcttattatgaagaacatccaaacgtccagctgtctttaacaacaggacatacgcaatttctccttgataaagttcttcgttatgaattggatggcgcgtttatcggatgcgaatgccatcatcctgagctcgaatcctatcctgcgtttgaggaagaaccagtagttgtttcggctgcctccgtgcccgatgttgaggaagccatcacaaagccgattctcgtttacagcacaggctgttcgtatcgagaaacacttgaaaaatggctgcgctccgtcggtgtcacacagccggtcattatggaatttgggacgcttgaagcaattatcggcggggttacagcaggtcttggcatctcgttgctgccaagaacggttgtgcagaaacatgaagcagaaggatcaattcgattgtacccgctgcctgaagcgctcagccagatgaaaacagagtttattgttcgaaaagattcgtttatcagcagcgcgctgagaacctttatggattcctttacgccagataaaacggctgaatcacaaaaaagcagtctgctataatgtacagactgctttttggctattgtttgtttcgatgcgcttcatttaattccttaatatgctgaatgatctctttaatgccctgctttgcgtcggggtatgtcgcattccaatgcttagcgagcggtggcatgctcttggctatatgcgtgtacaaaatccattgcttcacttcttcttttagctcatcgtttgtctcaccaagcagaagctcagtatacttctccagcaatccatccagctgctcctgaagtttttgttccatttgccatcttcctttcgaaaaaacagcaaggagctttctcaattgaaagctccttcgctgcgttatttatccatgtgatgtgaaagccgcttcctggacaatgcatctgcccctgccatgaggaatgcaaagaggcgttccgaagagcgggtcctgtgtaacctgacagttcatagaaaacacattttgcacaagatcacaagtgatgacctcttccggacggccttctgcataaatccgtttatcttttatggccacaagatgatgcgcatagcggcacgccaagtttaagtcatggagaaccataacaatcgtccggccttccttttcattcagctcaaacagcaaatcaagaatttcaatttgatgcgtcatgtctaaatacgtcgtcggctcgtcaagaaggatgatatccgtttcctgggcaagcgtcatcgcaatccaagcccgctggcgctgtccgcctgacaaagaatcaacggcgcggtcagccatgtcctcaagctttgttgctttaagcgctctttcaactgcttcctcatcctcttttgaccactgcttcagccagttttggtaaggatatcttccttgcttcaccagctgatgcaccgtcagcccctcaggagccgaaggaccttggggcaggattgcgagctcttttgcgacttccttcgtcggaagcttggcaatcgctcttccttccagcagcactgaaccgcctctcggcttcatcaggcgcgctaatgaacgtaaaagtgtcgattttccgcagccattgctgccaataaatacggtaatttcacctttgggaattgttaaattcaactcatcaataataacggcatccccgtatcctaagctcagcgtttctgtagaaattgcactcatacccataaccgctcctttttgctggctttttagcagcactatgtattgcacgttttctatatacatgcttttaagtcaattatcatcaatgcaagtgattccgatattcagccatttgatatggtcatatatccctcattgtagcagaaaacactgactttgaaaatcattttcaattagttttatggacataattgacgtttatgggttttttatcacaagattacttcttgatttctctgatggagccgtccttcagcttcaattttaaatcgatatgatcataatgactgtccagattaaatgctgccagcacactgtgtatcacttctgtttcagccatttggtctgtcacggaaagctcgctcaaaatcattttcatctcatccaatgcttcttctccctcctgattgacaccggagagcttatcctgtatttccgctttttcctgagttccgttctttgtatagattccttcataacggttatgctcaccatccccgtagctcacacgaagcgaaaaattactgtagggaacggacttcagctgggtgacggctgtattttctccttctgcctgctgctggtcttcattgagacggcagcccgcaatcagaaccactgcgagacatacagccccggctgctctgaccaaatgcatatgtttcccccctgtaggattccatttattttaggtatatccagagaatgaaatcctcattcagagaagaattgaaaaagccggggcatttaacgccacggctttttctttaagattcggtcatttgtaaaaaggtttcggcgtcacgcacagccagcttgatggcattctcccagaaatcgcgctttgtgatgtcagcgcccaaatgcttcatcgccaaatcctccactgtcatagaagccgtatcgcgcaatagcgccatatacttctcttcgaatgtgtctttttcttcaagcgccaacgcgtaaataccaagagaaaacaggtagccgaatgtataagggaaattgtaaaacggcaccctcgtgatgtgaaaatgaagctttgatgcccaaaaaagcggatgatattcttctaacgcattgcagtatgcctctctttgcgcctcttccatcagctcattcaagcggctggccggtaccactccccgctttcgttcctcgtagaatctcgtttcaaatagaaatcttgcgtgaatgttcatgaagaacgcaacgcttctttgcactttatcctccagaagaacaagcttttcttccctcgtctcggcctgctggacagtcgcgtccgccactatcatctctgcaaacgttgaagctgtttctgcaacgttcatggcgtaggaacggtttaacggcctgacgttgagcattgcttcctgatggaacgcgtgcccgagttcatgcgcaagggtagagacatttgaggcgcttcccgaaaatgtcatgaaaatccgggattccccgctgtccggaaaactggtgcaaaagccgccgactctttttccgctcctgtcttccgcctcaatccagccgtcccgaaacgctttttcagtgaatgaggacagctttttgccaaacgttgaaaactggctggtaatgatatttgcggcttcatcatacgaatagacctttccgtcagaaccgatcggtgcctcgacatcgtaccagctgagtttttcaaggccgagcatggatgctttccggttcaaaaactgaacgaacggcttcttgttttcagtgatgacctgccacatcgtatcaagtgtttcttttttcatcctgttaatttgcagcggttccttcaggacattctcccagccgcgcgctttataggtttcaagccggaatcccgccaaatgattcagcgtgctgctgaaaatatcttgcttgctctcccaagcttggcggaaacgttcatatactgtttttctgacagtacggtcttgatgatccatcatattctccgcctgaccgacagacaattgcttgttttcaccgttttcctcatacgggatcgtcattttcccgacaaccatattgtataagtcactccaagcgtgatatccgtccaccgcaaggtttccgatcagtttttccttaccggggctaagcttttcggcaaccctctgtcttctttcatttaatatgtaagaaacatcgcgcaatcccggttttgttaacaattcattccacacgtcttgattaatgtccacaagtttatgatctaatgtaacgagcgacgattgaaaatctgcggaaagccgattcatgagtgcctgatgctctatagccttttgatcattgatattctgggcctggaggcaagcaacaaaagcgccggcctgctgaagcttgacggatgtctgttcgaataaatcaagcaacgcggtcagcccttcagcctcttcaggcgattcaggcacctgaaacgcatcagtcctgtcttgaaatgcacgcagactttgtgacagcttctcaatataacctttgaattcttccgattggctcccgcccttaaaaaatgaatcaagatcccatctttggcctaccccttgcagcgccatatcacaaaacccctttccttctttcgttctattatagaacaattctgaattattgtataaaaatttctattacaggcgtcatttcgtgttcaggatagtacaatagctgtagcagtttaataggagggttaggatgaataaaaaaatagccatcgtaacaggagcgtccagcggcttcggtctgctggcagctgtaaagcttgcccgatcatttttcgtgatagccacatcaagacagcctgaaaaagcggaacagcttcgagaattggctgcagcacacaatgtgtctgattctattcacattacagctctcgatgtcaccgatgaacaatctatagtctcattcggaaaagctgttagtgcttacgccccgatcgatttactcgttaacaacgccggaacggcttatggaggatttatcgaggatgtgccgatggaacatttcagacaacaatttgaaacgaatgtcttcggtgtgatccatgtgacaaaaaccgtgctgccttacataagaaagcatggcggcgcaaagattataaacgtgagcagcatcagcggactgacaggattcccagcgctgtcgccatatgtttcttccaagcatgcattggaaggtttttctgaaagcctgcgtatcgagctgcttccgttcggtatcgaaaccgctttgatcgagccgggctcatacaagacatcgatctggtcaacgtcattatcaaattttatgtcggtgcctgctgacgattcagcctatcatcaatactataaaaagatcctttcctatgttcaaaaaaacggagaagaaagcggagatccccaagaggttgccgacctcatttatcaattggcaacaaaacagcacataaagaatttgcgatacccgatcggaaagggcatcaagctcaccctgctgttccgatcgctttttccttggtctgcgtgggagtctatcctgaagaaaaagctattcagctgatctaaattataattattataatttagtattgatttttatttagtatatgatataattaagtcaacagatcacaaggaggacgttatcttatgaaaactgaaaacgcaaaaacaaatcaaacattagttgagaattcactgaacacacaattatcaaactggtttcttttatactctaagctccaccgtttccattggtatgtgaaagggcctcatttctttacattgcacgagaaatttgaagaactttatgaccatgcggctgaaacagtggataccatcgctgagcgcctgctggcgattggcggacagcctgttgccacagtgaaagaatacactgagcatgcatctatcacagacggcggaaacgaaacatcagcatcagaaatggtacaagcattggtaaacgactacaaacaaatcagcagcgaatctaaattcgtgatcggcctggctgaagaaaatcaagacaatgcgacagcggacttgtttgtcggattaattgaagaagttgaaaaacaagtgtggatgctttcctcttatttagggtaacaaaaaagctgaaccttaatcgggttcagctttttgttttttcttagcttgaactgctttctgtctgcttggtcagtgttgcgttcaacgttttcgtttttccctttcgcagcacttggattgttgttttatctccgacttttaagtctttgtaaaggatctgacggatatccgcactgctttccacgtctttaccgtttagtttgacaatgacatcctcagatttaatacctgctttttctgccggcgaatttgcttgaacttcttttacataaacacctttgcccaattgatctccaaacaggccgagcgtattttcctgataggtttcaggaacttgtgacatgtcaatcatctgcacgcctaaaaacggacggtccaccttcccgttttgcagcagctggtcaacaatcggctcgacatcattgcttgggatcgcaaatccaagtgattccacgccgctttcgctcaccttcaagctgttgatgccgatgacctggccgcttgcattgattaatgggcctccgctgttccccggattgatcgctgcatcagtttgcagcacgttcatttccaccgtcccttgtgttgtatccacatcaattgtccggttcaatccgctaatgatgccttgtgtcaccgtaccggaaaactgctgtccgagcgggttaccgatagcgattaccttttcgccagtgcgcagctgtgaagagtcaccaaagctcgccactttttttacattcttgccgctgatttccaaaactgccaaatcagtaatggtatcgctgccgacaagcttggcagtttccgtttctccgttgtatagcgtaacagtcagcttgttcgcgccttcaacgacatggttgtttgtaatgatatacgctttatcgctgtcttttttgaaaataacacctgacccggttccgctttcactttctgagctggagcctcctcccgtgccgaatgtgttattttgagaggtttggatatttgagattccgacaatcgtaggctctaaatcctctaccatatcagcgatgtttgatgcgttcgttatcggcgccgttgtaaaattatcagactgcacctgtttatttgcggaagcggattcggtcgcctgattttggtctgacggcagataaggcgcgatgccaagcatgaggcccccgccgataataccgcctaaaatcgggctcagccatgcggctctccgtttcttttcttttttcacagccgtttcttgcttttccatttctagtgcagaagccgtttcctgccgtcccgcttcatatgacacaggcgcgtcaagcaattcttgttcagaatgtccaatcagcttctggttttctgtattctgctgttctgtatgtgaaggttcagtttgatgttgatcgttttggccatcacgtcgataatccatgttcttacactcctttaacggttattcatttatcgttacatattcatcgcatgtacaagttcaattgtcccaataatgaggagaaaagcaaagcaccaaaatagaatatgtttgatcatcctacatcttcctcgctctttttctcttcctttcttcccttatacatatcataaacaaacattgtgggataaaaatgaaaagaatatgtgaaattatgaaaattgcctgccgtatgttaaaactagtttataatgacgttgaaaggatgtgaagagccttgtcatacaccatttatctagttgaagatgaggataacctgaatgaactgctgacgaagtatttagagaatgagggctggaacattacatcttttacgaaaggtgaagacgccagaaagaaaatgacaccgtctccccacctatggattctcgatatcatgctgccggataccgacggctatacattaataaaagaaatcaaggcgaaagatcctgacgtgccggtcatttttatttccgcccgagatgcggatattgacagagtgcttggcttagagcttggcagcaatgactacatttcaaagccgtttctgccgcgggagctgattatccgtgtgcaaaagctgctgcagctcgtatataaggaagctcctcctgtccaaaaaaatgaaattgccgtctcctcgtatcgggtcgctgaagacgcccgcgaggtctatgacgaaaacgggaatattatcaatttgacgtcaaaggaatttgatctgctgctattatttatccatcataaagggcatccatactctcgtgaggatatcctcctaaaagtgtggggacatgactacttcggaacagaccgggtcgttgatgatctcgtccggagactgcgcagaaagatgcctgaattgaaggtggagacgatttacggtttcggctacaggatgatgtcatcatgaaaaacaagccgctcgcgtttcagatatgggttgtcatatccggcatcctgttagcgatatcgattttactgcttgtgttattttcaaacacgctgcgagattttttcactaatgaaacgtatacgacgattgaaaatgagcagcatgtgctgacagagtaccgcctgccgggttcgattgaaaggcgctattacagcgaggaagcgacggcgccgacaactgtccgctccgtacagcacgtgctccttcctgaaaatgaagaggcttcttcagacaaggatttaagcattctgtcatcttcatttatccacaaggtgtacaagctggctgataagcaggaagctaagaagaaacgttacagcgccgacgtcaatggagagaaagtgttttttgtcattaaaaagggactttccgtcaatggacaatcagcgatgatgctctcttacgcgcttgattcttatcgggacgatttggcctataccttgttcaaacagcttctgtttattatagctgtcgtcattttattaagctggattccggctatttggcttgcaaagtatttatcaaggcctcttgtatcatttgaaaaacacgtcaaacggatttctgaacaggattgggatgacccagtaaaagtggatcggaaagatgaaatcggcaaattgggccataccatcgaagagatgcgccaaaagcttgtgcaaaaggatgaaacagaaagaactctattgcaaaatatctctcatgatttaaaaacgccggtcatggtcatcagaggctatacacaatcaattaaagacgggatttttcctaaaggagaccttgaaaacactgtagatgttattgaatgcgaagctcttaagctggagaaaaaaataaaggatttattatatttaacgaagctggattatttagcgaagcaaaaagtgcagcacgacatgttcagtattgtggaagtgacagaagaagtcatcgaacgattgaagtgggcgcggaaagaactatcgtgggaaattgatgtagaagaggatattttgatgccgggcgatccggagcaatggaacaaactcctcgaaaacattttggaaaatcaaatccgctatgctgagacaaaaatagaaatcagcatgaaacaagatgatcgaaatatcgtgatcaccattaaaaatgacggtccgcatattgaagatgagatgctctccagcctctatgagccttttaataaagggaagaaaggcgaattcggcattggtctaagcatcgtaaaacgaattttaactcttcataaggcatctatctcaattgaaaatgacaaaacgggtgtaacgtaccgcatagcagtgccaaaatagactgtagatgttttgcagtctatttttttatgtgaaagaatagccgttaaaatctctgtaatttgttttgagcggctgtttgcattgatgaacccattttttctctgacaaggtctgcttcggatatttgactttctccactttgattcctctgtttcgcaagcggctgatcatttcgtccaattctctcattctagattcaccctttcgcttgagctttgaccattcggtcatctcaatttataatataaataatacatgataaaaaaacaagttacaataaggttaattttataacagacggtgtgactatatggtcatatcctagcaggcctccgggctccgaaagggtggaaccattgaaggaaaaagaaaaactgattattgaaacagccttaaaactatttgcccaaaaaggatacaactcaacatcagtccaggaaatcgcaaaagaatgcaaaatatctaaaggcgctttttatatttattttccttcgaaagaagcgcttcttctctctatgctgaactactattatgataaaacgtttacccgaattttaaatattaaaacgaagggcgacagccccagaacggcttaccgtaaacagctgaccgtcctctatgaaaacattcttgaacacaaagattttatcagcatgcagttgaaggagggttctctgccttacacagaagaagtggagcaatgcgcaaaaaaaatccgccagtcctcacttcaatttcatatcgacagcctgctgaacatctatggaaaaaaagcggaaccctacactgctgagctttgttttttaatagagggcatcagccagatttacctggaatgcatgattttgctcgggtacactgtgaagccgtctcaattagctgatatcattatgaatcgaattgatgatatggtaaaaggcatgtctgaacgaaacgataagcctttcatcacattggaagaggcgagctctttattcgggcctcttacgcacggacggcctgacccgctgactgaatcaattgtgaaaagcctacgtgacaaaattaacagcttaaacacaaactcctctcttgaattatcggagagcttggacatacttgaagcagaaatgaagaaaaaaacaccgaagcttgcgatcataaaaggaatgattcataatctgacggagtctgaagctctcgccaaagatgcggaacagcttaaatatttattaaaacagcaacatatttagaagaacggctgcttaaaaagcagccgttctttcttcctattacgcctttggttttaccatgtcttccggcttaaccatttcgttaaattgctcctctgtcagcaattcaagcttcaaagctgcttctttgagcgtcaatccctctttatgggcaagcttggcgattttcgccgcgttttcataaccgatatgcgggttcagcgccgtaacaagcattaatgaatttgacaggttttcctgaatggtttctttattaggctcaataccgacagcacatttatcatggaatgaattcatgccgtcactgagcagctgcacagattgcaggaagttgtaaataataacaggcttaaacacgttcagttcaaagttcccctgacttgccgcaaagccgattgtcgcatcgttccccatgatttgcgctgcgatcattgttaacgcttcgctttgtgtcgggttgactttaccaggcataatagagcttcccggctcattttcaggaatgacgatctccccgatgccgcagcggggtccgcttgcgagccatctgacatcgttcgcgattttcattaagtcagccgcaagcgcttttaatgcgccatgcgcataagtgatttcgtcatggcttgtcagcgcgtggaatttattcggcgagctgctgaacgtttggccggtcagcttagtgatctcttctgagacaagctctccaaactctgggtgagcgttgatacccgttccgacagccgttccaccaattgcaagcgcacgcattttatctgtcgcttccaaaatcatttccttcgaacggtccagcatgtgaacccatccgctgatttcctgtccgagggtcagtggcgtagcatcctgaagatgcgtgcgtccgattttgacaatatcattgtatgcttttgctttttcatccagtgtattgcgaagctgatcaagcgccggcacaagctgctcgtaaacagccaaaacagcggcaacatgcatcgcagtcgggaatgtgtcgtttgagctttggcttcggttcacgtcatcatttggatgaatcgtttgatcagagttcttctcttttaataaagcagtcgcacggttggctaccacttcgttcatgttcatattgctttgtgtgccgcttccggtctgccatacgacaagcgggaagttgtcatcgtacttgcctttgagcacatcatcacaaaccgctgcaatcgcttctgctttttcagcgtccagattgccgaggcgtttattagctagagcagtgcttcgttttaaaattgcaaacgccttcacaacacgcatcggcattttttcagaaccgatcttaaagttctccttgcttcgctgtgtttgggcaccccaaaatttatcagcaggaacttttacttctcccatggtgtctcgttcaattctgtattccatttatgtatccctccataacggttgcttcaatagatcataattcgccaatgacacaaaaaatcctttttatttttcgatcttggcagattttaattttaattcaagatatacgcgggaatcctttgaatatttgtattttggatttgtcctgccgtactcctttgatgtataagagacatcataatgctgttcaaatgatctaatgagctgttcaatttcttcttgttttccagctagccttacctgtgccacttcgtatcctccgctttcataaaaaaacttactccatgaaatactctaacacagtatatcatttttttaacaggaaaagataacctctactaaggttttggataagaggtgacctcattggaacaaacagagtttaaggaatatatacacgataatttagcattggtgctgccaaaattaaaagaaaacgatgatctggtgaaaaacaaaaaaatgcttgcgaacggactggttttttactatctctatttcagtgaaatgactgatgagaataaggtgtcagaagccattaaaactttgattaaagatgaggagaccttaacgcttgaccaggtcaaaaaacgccttgaccagcttgacgcaagacctgttgaaactgcaaaaaaaacgattgaatcgattctcaacggcaattgtgctgtgtttatcaacggattggataaagcctatattctgaccacaggaaagaaaaaaacaagaagcctgacagagccgacaactgaaaaagtggttcgcggcccaaaagtagcgtttgtagaggatattgatacaaatctcgctctgatcagacaaagaacctctcatccgaaattgatcaccaaaaaaatcatgatcggcgaaaacaagctgaagcctgcagccattatgtacattgaaggcaaagcaaaaaagtccgtcataaaagaagtgaaggcgcggcttaaaaatatccagctggaagatatccaggacagcggaacgctcgaggagctcattgaagataataaatattcaccatttccgcagatacaaaatacggaaagacctgacaaagtatcttcagccctgtttaacggccgtgtggcaattttggtcgacagttcaccatttgtgctgctggtgccggtttctctcggcatcctgatgcaatccccggatgactactatgaacgctggatttcagcatctcttatccggtcgctgcgctttgcttctatctttatcaccttgtttttgtcatcgatttatatagcacttgtttccttccatcaggggctgctgccgaccgcactcgccgtcacgatttcggcgaacagggaaaacgtgccgttccctccgatatttgaagccctgctgatggaagtaaccatcgagctgctaagggaagccggactgcgactccccaatccgctcggacagacgatcggcctcgttgggggcgtagtcatcggacaggctgctgtagaagcgaatctcgtcagttcgattatggtcattgtcgtcagtgtcattgccctggcatcctttaccgttcctcaatacggaatgggtctgtctttccgggtgctgcgttttatttcgatgttttccgccgctattttagggctatacggcattattttatttatgcttgtcgtttatacgcacttaacgagacaaacgagctttgggtctccgtatttttcgccaaacggattctttagcctgaaaaatacggatgactccattatccgtctcccaattaaaaacaaaccaaaagaggtgaataatccaaatgagccaaaaacagactccactgaaacttaatacctttcaaggtatttctattgttgcaaatacaatgcttggggccggacttttaacattgccgcgagcgctgaccactaaggctaatacgcctgacggctggatcacgctgatattagaaggtttcatttttattttcttcatttatttaaacacgctcattcagaaaaaacatcaatacccttcactctttgaatatttgaaggaagggcttgggaaatggatcggcagcatcatcggccttttaatctgcggctatttcctcggcgtagccagcttcgagacacgggcaatggctgaaatggtgaagtttttcctgctggagagaaccccaattcaagtcattattttaacgtttatttgctgcggcatttatttaatggttgggggcttaagcgatgtgtcgcggctgtttcccttttatttaacggtaaccattattattttgctgattgtgttcgggatcagttttaaaatttttgatatcaataatttgcgtcctgttttaggcgaaggccttggacccattgcaaactcccttaccgtcgtttccatctcttttttaggaatggaagtgatgctgtttcttcctgaacatatgaagaaaaagaaatacacgttcagatatgcgtctctaggatttctgattccgattatcttatatatccttacgtatattatcgttgtcggagctttgaccgctcccgaggtgaaaacgctgatttggccgactatttctctctttcagtcctttgagcttaaaggcatatttattgaacggtttgaatcctttttactggtggtctggattatccagtttttcaccacatttgtcatttacggatactttgccgctaacgggctaaagaagacatttggattatcgactaaaacaagcatggtgattatcggcataacggtcttttatttttctctctggccggatgacgccaatcaagtcatgatgtatagcgattatcttggctatatttttgtctccctgtttctgcttccgttcattctctttttcattgtagctctcaagaggaggattacaacaaaatgaaaatccggattttatgtatgtttatatgcaccctattgctgtccggatgctgggacagtgagaatatcgaggaattaagcttagtgatcggagtagggctagacaagcctgacgatgaaaatttagagctgacacagcaaattctcgtgccgaaaataatcagcgccaaggagggctcttcatctgatccgacacagctttctatcacaaagggtaaaactgtccatcaaatgatgagaacctctgcattaaagcataagcctacgttttcacagcatttgcgtctcattctgctttccaaaagcgtgattgcggatcaaattggaatggacgccattattaaccagtttgtcagagacaacggaacaaggaggagttcctacgtctttatcaccaacggccgaactaaggatatatttaacatgaatgatgaaggcgaacccgcatccaacgtgatatatgatctgacagagaataataaggtgacgatcagaacgatggagccagttacattgggggagatctcagaacacttaacctctgacgattcattcctcatccctcatgtcggtaaggaaaacggcaagctcgcgataaacggagcctctatcataaaaaataaattatggcaccgggacctcaccccgattgaggttcaaaatatcagcttattttcaggcactgtcgagggaggcgtcattgacttgaagcgcgatggccatctcttttcttatgaagtatattcaagcaatcggaagatcaagacggcatacaaggacggaaagttcaaattcaccgtcacccgcaatattgaaggtcgtctatctgaggactggaatcccaatgaagactcgtttaaggattcatatattaaaagtattgaaaagacagtcgaaaaacgagtacacgaaacagtaacgtcatttattacagagaagctgcagaaagagatcaaagcggacgtaaccgggctgggaaacgaggtcagaattcattatcctcaaaagtggaaaaagatttcaagaaaatgggatgatgattatttcagcaatgcggaaatagactaccgggtcaatgtgattgtcagagacttcggaacgaaaggcgcaaacaaatagcagccgcctaattcacgagatgatttcggtgcgcgtacaccgccgcctgcgtccggtcactgacatccagctttgataaaatattcgtaatatgtgttttgactgttttaatcgtaataaacagttcctcgcctatttctttgtttgtctttccttctgcgatcaggcagagtatttcgagctcccgttttgtaagcgattcatgcgggagcgcgttttcacctgagtggcgcagcctggataatacttttcccgccacttttgactccagcttcggctctcccttgcttgcggcgcggatggcatcggcgatttctgccgcttttgaggttttcaacagatagctgagcgcgccagcttcaataaccgggtacactttgtcatcatcaatgaagctagtgagcacaataattttcgggtcggaaagctcccggcaaatttgctttgtagcttcaatgccatccatgccctccatgacaaggtccattaaaatgacatcaggcgacagttccacagcaagccgaacaccttcgctgccgtccgatgcttcgccgatgacttcaatatcgggctgcgcctccaaaaaagccgcgagccccattctgaccatttcatgatcatcaatcaataatactcgaatcacgttcgttctctcctttttcttccggaaaaatcgggaccttcacttcgatttgagtgccttttccttctactgaaatcacttcggcgacaccgccgatttcacttgcacgttctttcatagaattcaagccgtatgaggaggctttcacctggtccattttaaagccttttccattatcaatcaccttcagacggagctggctgttctttatgcccagaatcacggttacttttgacgcttttgaatgtctaaatacgtttgaaagggcctcctgcacgattctgaacaagtggtcttcaacacccttggatatcgctgtgtcctgtatatcccactcaatatcaatcggctgcttttttcggaactcgtccaaaagctccgtaaggccctccttcagcccttttccttcaagggtaacaggccgtaaatggagcagcagcgccctcatctcattttgggcttcgcctgccatatgctcgaccatcttgatccgcttgactgttttgtcatcagcatccttgacatgttccagcacggctgatgtcatcatcgatatggcaaagagctgctggctgaccgcatcatgaagatctctagccaatcgctggcgttcttctgagataaccgacttcttcatttgagcctgccattccgcacgttcattggaaagtttctgcagggatgcgacttgaagctccacgcgcttcgccatttcgttcagctgatcagcggccaggccgatttcatcatcaccgagcggaggtatccgataagcgaaattgccgttttcaaaggttaaaatggattcaattaatgtatcaatccttgtcttcaaccggttgccgtacatataccctgaggcgaaaccgactgtcacgctgatcagaagcaaaatcaggataaacggaattccgaaccagcttgatgacagcaaaacaagcggatcgagccgatagtaaaacatcataaaggaaatcaggcaggcaaaaaggagcaggctgattcccgttgtcatgcggatggcgcgccattggaggctggcaagcattttttttctcatacgtacttcacatccacatcaccgataaataaggaaacggacacttttacccggcgctttgactcgctgaaatcagttgacgcggcatataccttcgtgcttaatccgcttttcttcgagccgatcagattaatgtcacctataaaaacagctgagctgacagccacttcaaggtccgatggtacataaatatcaacgttaccaatgactccgctaatgacgattgtactttctccctcgggaatcattgctttagataaatcgattttgatatcaccgataaaaccagagacatttaaatcattcaggtcaaacggctgcttcatcatttgcagctcaccgataaaaaagctgcgcatgtcgggatgttttacatcttttggcggatcatgatgttcttttttattgagattgacctgtttctcattcggttcaaatatcggcttccctttgataagcctgtagccggcgtaaatcagaaatgcggcaaacgcatagccgaataaattaaaggtgatgctgaagaggtttttcaaaaatagaaacgcggcaaagatatacatgacggagccaagccaatcacgggaatattttttaaggaaatagccggcaatcagaaaaaagagcggccaaaacagcagatcgcctattccgataatttgcaaaaacatactgatgccgaataaagcaatgatcaatccgagaagctgtttttttgtcattcctggtgtccgcctcctttcttctgcctagtgctaccgtatcgctagatccccgctgtccgttttgatgtcgattggatgctggccgcttccttgcgtgcctgtgatgtgatgctgttctttatgtgctttatcagcaaatgaatacggcgaactgacgtcaccgcttgctgataaagcattgactgcaaagctgccgttttggggaaggcttacattagcatcaccgcttgtcagcgtgacagatacgggaccggttacctttttcaatacagcattaaaatctcctgaagtcattttcacatcaagagagcctgatacatgaaccagatttgcgtcccctgaagctaaatcaatgccggctgttttggagacggtatttgaaatggaaacatcccccgatgatgccttcactttcagatcttgaatgcggacgtccgtcacgctcgtatttccgctcgcagatactgcgttcagcccggaaagcgcaagatggtcattcccggccacagacacgtcaccgcttgaggttcgtactgccagatcacctttataatcatacggaagcctgacgataagagttgaacggttaaatccattcaaaaattgaaattctttttcctttacggtcagctccagttttcttctgttttcagtaacaaataactttcctgagtctcctgaaatgcctgccgatatgtcacttcgttcttccgctataatccggacatccttgctatccgactcaatgaccatgctgtcaatgtcccgcggcgatgcgctggctgaatcagcttctgtgccatttatgaaacccaggcctgcagcaaacacatcttttacgacaacagcgaaaaaaaccagaataccggcagtgatcaacagtttgccaagcatttttttcattcggtttcatccttctcattcattctattataaaggaaaagcttgcgaattgatacgtgcggaaggggaaggacttgaccgcaaatccttccccgttccgcttattcatttgccgcttgtgtctggtctgatttttgcagtgaaagtgtccgcattttttcaatctccgcttctacatcgtctgcgaattctttacgtgtaagttctgtgccggcttccgctgactttgaataattcgcgcggatttccatttcttcaatacgattttcaatacgcaaaaattcacgatacgcgctttcactgtcaattttgtcaaatgtggtattcatatgctctttagctttcgccgcatttgcccgcgcaatcagcgcctgttttttatcctttacgtcctgaagctttgtttcaagtgcagccagttgctctttcagatcggccagctgactgtttgcctgttcataggaagctttatgctcagccgcctttccttctaaatacttcatttcagtcagcgcctttttcgccagttcttcttcacctgcgtcaaatgcgagctgtgcctgatttttccgttttccagccacttcagcggcttcttcatattttttcttaaattgataggcaatggtgtgctgtttcacaattgtttgctttgcttttgcgatgtcgctttccatatcgcgtacatattgattcagcatcacctttggattctccattttatcaagtccttcatgaactgacgcaacaaacatatctctgattctttttaataccatacctaattcctcctaatatattgatattattttttcttcaaaaattcttcccattcatcatcaaagtgagattggtaggcagcagaagccggttcaggatcaaaagatgatacaccgttatcagctgatccgtttttcatcagcttccagccgtaatacaccatagcggccgccaatgcgattccgacgacaaacggaagtgagcagatgagcataatggctccgataccgcccacgatgattcccgtgatggtttttcccgcggcaaaccttttgactcctgcgtatgtcatcaagctcccgatggcgagcgggatgataaagccgaagcttcctcctccaaaaaagacggatatcccaaatacaattaataagaatccgcctatagttttcttgttgatcttcatgcagatcctcctttcgttttccttgtcttcatcttatacaagttagaagatatgcaaaacgaatcagagattgatttttatataagaccggagtcgtatctcggacaggacccatcggcacaaaaaaacgccatgcacgaggcatggcgttttaaaaccctttacagatgaacacttgcttccctttctttaatcaggtcggacctttctgctttggccagttttgtaaacagcaagattccgatacccgcaataatttcgacaatcccgccggcagcaatcactgttcctgagccgaaagcattagcggcatacccgcaaatgacagctccggcagggatcgaaatatttgagatcatatgtataacggcgtaaacctgcggctgatcctcactatccacagacgtctggataatcgtgtactcaggaacattaacagcactgactgcggcaccaaaggtaaaagcagcgaaaaagacgagcggcaaaaaggtattcatccctgtaataaagaaagcaaatccttcaataatgccggcagtgacgaataacaagccgtacctgtttaccttgactttcgccagcacaaaccctaataaaaacgcgcccgcggcggtggtggcctttaaaagcgagtatacgatcggctggccgtttaaatcttccgcaacgtatacggcagagagcgcttcccatggggcagccgcgaaattcataaagatacagtaaatggcgagcggatataaaatctggtgttttctgacgagcctaaagccgcgtttcagtcttccgatatatgtgcctctctgtgtaacaaccgcagactctgattgagattcaaccgcagtgtacttaataaaaagaacgagaaaacctgacaccaaatagagcacaagtgcgataagcatggtataagaaggactaataaatgtaagaaaagcgccgcataatgtgacagccccaagccggacaatttgagcggaggattgcagcacagcgtttgctttttgaatgccctgttcattgacgatttgaggaatcaaagcgatagaggcgggattgtaggcagctccagtagctgaatgcacaatcataagcgtcatgacaaaccacagcggagagaagcccgcaaaatgacatagagggataatcaaaacaatcgccgcccttgtcagatctgaaaagtacatccaaaatttcagcgtggtctgtttcataaaaggccccgtcacaggcgccagaacggcttccggcaaaaacgtgacagcaatcaataaagcagtgccgatcgcacctttgccgtcataaattaaaaaccataatattgaattaaatgcgaacatatcgccggatatcttgactattcttgagaaaaacagataattgaaatttctcttccagatgctatcactttcaattaaattcaccatccatcagagccccccgttgcctattttttacatctatttattacaatatctcatttttccatttttcagtcaataattcataaggttcattttttgtcgtaaaatgggaaattgacagagtgaaaaacaaaaaaagccggcatgtatttgaacacgccggcttccttttcactttttatgattcgctgctgtttcggtcccgaaacacaatggcacttctttcatattctacatcgccaataccgcttcttgcattcacaacccgtgcggcggcaaagaaataatcggacagacgattgagataacgcagcactgtttcatgaatctcctccgatttcatcagcgccaccactcttcgttctgccctccttgtaatggtgcgggcgatatggagaagcgaagcacctcttgatccgcctggaagaataaatttcttcagttccggcgcttctgctgtataggcatcaatgcgcgtttctaaaaaggaaacagattcttccgttagtttgtagtcttttctttctgtgacgattgccagatcgcctccgcagtcaaacagctcatgctggatggtcagcagctcggctgtcagatcttcaaagccgggctgcccggaaagctctgccaaagcaagcccgataaagctgttaagctcgtcaatcgtgccgtagctttcgacgcgtaggctgtccttgtccgttctgcccccgactaagcccgtttgtcccttatcgcctgtttttgtatatagtttcataccctgaatctcctttacagacttattcaaacaactcagcagcctcttttacacattcagctgtccctttctttatcaattgattcagccgctgttctatgttttcggattgctgagtttgagtcgcggcgatgagaatatcacctgtgcctcctccgtctcccagcactttcgtccgttctgcttcggcagccataagagctttgatgaagaattgatctgccgcatagccgtttatcaaaatccaaatcgaaaagccggtctgaacgcatatgaaaacggataactctctgtcttcatacgttcgatacacgaaacggtcaagtctttctgaagaagccatcgcacacgtctcctgcagttgaaaaccgctttctgaaagacaggccgtaagtccttctatcggatctggctgatctggcagccgtttatggatcagcgtcctgctccacgaaaaccctgcaccgataggcgtcgaggacaatgttcgaagcgggatttccgtttgcagaagaatgtcatcacgccccgcttggagcaatgcttcaaatgggatagactgccgcttcacgctatctttttcaggctgaatcacaatcatcggtttaggtgagctttgatgaaccaaggcggtgacatctgtatcgtacaccgcctttatgctttgttctgtaacagcatattccggtttttgcttaggcccggcggtaccgtttttcataaacatgagcccatcacagtacaggcttgcggtgttcagatcatgaaaaacgctgacagctgccaatccgctttctctcgtcaggcgtttgatcagatcaagcaggtctttttgataagccagatcgagaaaattagtcggctcgtccaaaaataaaatacgcggctgctgcgccaaagcttgtgccaaatacacccgctgctgttcccctccgcttagttcgcgaatcggcttttgcgcaaaatcggccactcctgtttgctccattgcttcctgtacaatggcttcacccttttcagtctgctgtctgaacagccccgtttggaatggatatctgccaaaggctacagtttcttcgacagtaaaggtgaaggcttgatccattttttgcggcaggacagccatgatttgcgccagttccttcggtttatagtccgccagcagttttccggccagataaaccctgcctttcttggccggcagcgtacctgtcagcaagtgcaaaagcgtggtttttccgcttccattagggccgagaattccaagaaattctcccttctccactgttaagctgacattgttgattaggcggctgtcgccgtatcctcccgacagcccttctgccttcatcataagcttctccccccgcgatgctgccgaattaaaataagagcgaacacaggcgctcccgccaaggacgtaatgatcccgatcggcagttcaatcggctcaatgatggttctggaaagcagatcggctaaaacaagaaaccctgccccaagcaaggcggacaacggcagtaaatgccgatggtccgttccccacaaaagccttgtgatatgcggaatcacaaggccgacaaagccaatcgtacccgatactgccacagcgcttcccgtcaaaagagatccggctattaaaatcatcatcttcctctgctgaacgctgactccaagaagctttgctttatcttctccatatgtcatcacgttcagttcccttccgtttataatcaataaaatggttcccaaaagaaaaaacgggagaaacaaaataacatagctccagcccctcattgagacgctgccaagcagccaatgcacaatcggaagcaggttgtctcctgtcaaggcgatgataagagaaataaatgcgcctaaaaaagagttggtgatgacaccggtcaaaatgagggtggaaacagacatcgaagcatgaacgaggcggctgaagaaaaggaccgccgccatcgtggccagtgccgcggctacactcaaaaccgggagtgtaaaccctccgatgacaggaaggtgcaaacctaagaacagagtcacaacagctccgactgaagcaccggatgacacacctagcgtatagggatcagcaagcggatttttcaacaatccttgaaaagcggcccctgcaatagaaagagccgcccccacaagggcggccagcacaactctcggcagtctgatattcatcataatattagtgtacatcggatcatcagaaccgatagagccgccgaaaccttgatgccaaaagacacgaaaaacagcgggaataggaatatgcaggctgccgcaagaaattcctaagatgatgctcacggctaaaaatgagaaaccaatgatatatgcggcataacgattattccttaaacgtatccgggtaaatgctttccgcaagttcttcgaccccttcgatcagacggggaccggaacgtgtcacaagatcagggtccacatcatatacacgatgatgtttcacagcattgatttcgctccagccatcgcgtttttccacagctttcgctttcacaccgtccgttgtaacaattgcatcaggattgagttttacgatcgcctcgtctgtcatttgcacccatcctgtctgatccgcagctgcgtttttagcatggatgacatttagcatttcattcataaacgtatcttttccggttgtataaatgtcaggatcaggagaaacctcgataaatacgcttttctcctcgtcttttgaaatggttttcgctttttcttgaatatcctttagatctgatttcatgcttttcacgagctgatcggcttttttctccgccccgccagcttctccgatcatttcgattgatttgtacacctcggagaatgattgtgcatcattgacagtcagcactgtaatgcccgcgtccttcagctgtttgatggcatccgctgatgctgacatggaagactcatgggccagaacgagatctggttttagagaaatgactttttcaacgtttacattcatatctccgactttctcaacctttttgacttcctttggataggtatcgtttgtggtgacaccgaccactttgtcaccaaggccgagtgcgtatgtaatttctgtgttgctcggcattaatgaaacaatcttttttggctcttttttgatggttacatcttggtttgacgcatcatcaatggtgacagggaacacttctgttttttgttttgcctttgaatccttctgatccgcaggattgccgcagcctgccagcataacagcagccaacagaagcgcagcccatatcccggctcgttttttcataatcttttcctcctaaacgaactaaaaaagcatctctacgacggtaaagatgctgtaaacaacacaaaaaagcctattgtttacacatcatctgtcctcgcagaattcgtgctgatcaaacaggcaggtatcctggctcttggcgcttggccaattacagtggcgggaccgcaccggcttttaccggtttcccttttaagccggctgttgttcacggaccggcacctatttgacattcgtatccgtttttcggagtaattatactatatgactgacaggcttgtatatgtgtcctgaatgacttttccccatattgtgtatggaagcaaaatcctcgtaaacactaaatttgatcttgtatacttaataccatcatctatcaaaaggaatgattcttatggatttacagctaaaagaaaaactcgtcttaatcaccggctcgacgtccggtatcgggaaagccgccgcaaaaagctttctgcaagagggtgcggcagtcattgtcaacggacgcaaacaggagactgtcgatcgcaccattgaagagctttctggctatggaacagtgcacggtgctgctgccgatttgtcaaaaacagatgaagcagcggcttttatcgaaaaagtaaatgaaatcggtgatatcgatatccttgtcaacaaccttggtttcttcgaggtaaaagacttcgccgatgtgacagatgaagagtggaatcaatatttcgaagtgaacgtgatgagcgccgttcggacaagccgtcacttccttccaaaaatgcttgccaaaaacagcggccgcattttaaatattgcaagtgaagcaggcgtcaaaccgctgccaacgatgattccatactcaatgacaaaaacggcactgatcagcctttcaagaggaatggctgaaatgacaaaaggcacaaatgtgacggtcaactcagtgctcccgggacctacttggacagagggcgtggcctcctatatggaaggcgccgcacaagcagccggacaggatacagatacatttatcaaagactatttcaaggtcaatgagccaacctcacttattcagcgatacgcgacagcagaagaagtcgccaacacaatcgtattcctcgcgtctgacgccgcatccgccattaacggcacggcacagcgtgtggaaggcggcattatccgttctctgtagtataaaaaacgcatccgttgtttcggatgcgttttttttatacgtctccagcaaatggtaccggctgatatccgcctgtttccagttgtgctgaaaacaaccctccagcgtgaggctgctcgtatctctctttttctgtcatttgttctgttgccgttgtaatgtaaagggtttttaagtctttgccgccgaacgcgcagcacgtgacatatttagccggcacgctgattgaattgatttcttttttctgaaacgggtcaatgtgaacaacgcggctgccgccaaacagcgccacccacagcatgccattttggtcaattgtcatgccgtccggcaatccgtccgactgatcaaaacgatagacaggttctggattcgaaacatccccgctttgaggatcatagctgtaacgtacaatctcctgggtcggcgtgtcgatgtaatacatcaaattccgctcgcggtcccaatccaaaccgtttgaggtggagacttgatccttgattttgacaagactgccgtctagattcaaacggtacagcgacgcctgtttttgctcgccttccatgctcgtcgtccccgcccaaagccttccgtacgggtcacatttagcatcattaaatctcaggctctcatgcatgtccttcggctgtttaattttttccaagctgtcatcccgaagatgatacaggtaaaacccgtccttcatcgtcataatcagttcatcctttgaatatttcgcaagcgccgtcacaaaggatttgaatttgattgatcggttgattttttcttcagggtcaaagatgtggagctcgctccccaggatatcaacccaatataagcggccgttttcttcatcccataacgggccttctccaatcactgcccgagtgtctgcttccaatactgcatccatgtgttacacctctttagcttcagtctatatattgttattcccggcaaagaggtgtccaaaccacttgatgtttattgttttttaaaaaggatggtaatgaccgttccaatgttcattctgctgttcacatggatcgttccgttatgcagatggacaagctccttggcaatcgcgagcccgagacccgttccggcagttgaatcttttgtgttcgtccctctgtagtaacggttaaacaaatgggtaatcgtttcttcatccattcctttcccattgtccttcacctttaaagatatatgattttttgtttgctccagaatgacttgaatctctgttcctttgtcgttgtgcttcacggcattcccaaggaggttttctaatatgcgcctgaaccacgcttcatcaagggcaaattcaatatgctcttctttggatacaaacgagatatcatagccttcagaaaacggatttttcttaaaatcctcaatgacatttttaaaaaacgggataaggctagtgagatttctctcaataggaagagcatcatttttcagccgatacgttaaatttaagtcttcaatcagcttagacatgtattcagatttttctctgacaacctgccccatttctttcacttcttccggcgaccagtcatactgcttcgactcgagcatcatgctgtagccgtaaatgctgctgagcggtgtttttaagtcatgtgacaaaccggcaatccattcttcccttgtcgcctggattttttctctgtttcttttatcccttctcagcgtttcagtcagctgatccattgattcaaatatctcaccgaagaagcggtacggctgtttgatttttccctttttatttttgctgacaggacggccttcccggtttctaggttcctcaagcttcccttttgacagattgaccagccatctaatcgtgtgaaaaatcggcagcccgaatcggaacatataccaaacggtcatccaaatgatatacatgaacaaaacggccatcacgagaaacatcgcttttaatacaaccttcaggaatgatttgttaaactcctgatcggttacatagactgggtttggcaccgtagcgaccatccatctgtctttattgaggatcttaacggaaatttcccgcttatagttccaaggcttagagctgtatttaagcagctccagctggttcatcgtttttctttcgctttttgtgctattgatgctgtcgagaatctttccattgctgtctaacaggtaaatggcgccttttttccgtttaatatagtcgatggtactagacttatagtgcgctagtgagtctatcttttgttcacgcttttcaacggaagtcaggagctgttcactttttgatttccagccggacaatagaagatacgacttatcttcaatattgatggcccaataattcagtttatagttatgaagctttttggttttataaatagacaaaagctctttcttggtataggtgcccggcacgtcttttggcacgccgtaggaataatcagtgtttccttccgaatcaatgatttgcatccagccgtgctgtttatcaacagatttcttcaggaaattatccacttcccatgtcccgtcttcgtttacatcgagatatgcctcaagtgtgtcggtcgttgctttcgtcagccctgaattggattccgcatcgctaaaacgggcgtctaaatagaaaaacgatgcaacaagcataaccgtaagcagcaggatcacaatcagcatctggccgaaaaagtgaaacaaaaacttccatcttaacctcatgaccgcttgccttcaggatttgggataaaacgatagccgagacctcgaacggttacaatatactccggattgctcggatcgcgctcaatcttctccctaagcttgcgaatatgaaccatgacggtgttgttgtcaccgtaggaaggatagccccatactttttcatatatttgatctttggaaagcaccacgttagggtgttcacaaaaatactgcaaaagctgcagaagctgggctgaacaggcaacggcttccccgcctacgatcaactcggcattttgcggagaaaaagtaaagtaatcatatgtgtaggtttgatttgaactcgtttctttcgattgatatgtacgcttgagatgcgctctgatccgcgccgctaattccagcggattaaatggttttgtgatatagtcatcagctccaaccgcaaagcccgataatttgtccgcgtcggatgatcttgccgtcaggaaaaaaatcggagcgtctgaatactctctgatcaatgtgcaggcttcaaaaccggacattccgcccatcatgacatccagcacaatcaagtcaaccttattggccttcacaacgggaatcgcttcttctgcgcttgccgcatccagtatatttcgataaccttctttttcgagaacgcgtttgatcatgtccacaatcgctttctcatcgtctacgattaaaattgacgcattttccacttttatgttcctttctgtcactgtttttttcatcttatcattatatcgtttatttatggtacatttttgaatacattggagcttggcaaatcaaaacagcaaaaaaggagcaaacaagcgctcccttttgatgttttttcatatgaaaatattatgagttctcatctaccatgtacaaaataaactcccaaaaccccggtacatcctgacataaaagcatatcagccttttcaaacattttgatcttcagctcttgctctaaatcttctctttcttgataggacgtattgctgagtttttttctgatcatcggtgaaaagcatgcaatcaggtgctcaatgtcataagtctcgtctttttgtttctttttttgttcaaactggccgtccacagcttacttttccccctttttttgcgccgctaactgctttctgatattctccagcccctttttatgaatgttggagatgttttgtcgggactcccctaatgaatctgcaatctcctgcatcgtggcaccgtgaagatagactttcgtcagcacacttttttgtttgtcagtcagcttctggatcgcttggtagagctggtaatcctgtacatgctggctcaaatcatcctgcctgtctaaaaattcttcaaatgcatcgctacctgtttcggaaggaagccgatctcccgcctccggatgatcaaccgtcagcggataccgtttttggtttttgcgaacccgcttatcaaaatcaatagaaaagatgcgaatcattgaattcatatacttgacgatgcggatttctttataaaattgcttaaatagctcgtccaatgatcttgcatctttttcgttagggctttccattacgtttttgaacaaacggtaatgctgaggattgctcaaaaaatgcttcacgatgggatgcttcattatctccttacattttgaccgtaaaagactttgatagtccatcaaaccgcctccctactaaattaaatgaaggaaagcaaaaaaaagtaaactactactttccgcctagtgtcttccaaaatactttgcagcagtttacgttttatcggttttcctcacttacatacatgactgcagaaaaagaagggaggtattttcctatggatcaggtttttatagaggaagtcgtaaaacagatcggcaatttggggtttcccgcgctgattgcaatgtatctgctgacccgattcgaaaagaagtttgatcaactaatagaactaatgacagaaatgaaagatcatgcaaaaaaataatttttcaatcgaagttgacttttcactggtttttttcacttaacaaaacagaagggaaaacgaaaggcctttcaccttctctttctgctatcacatttaaatgtaaggaggaaacatttcatgaaaaaacaaaatgacattccgcagccaattagaggagacaaaggagcaacggtaaaaatcccgcgcaatattgaaagagaccggcaaaaccctgatatgctcgttccgcctgaaaccgatcatggcaccgtcagcaatatgaagttttcgttctctgatactcataaccgattagaaaaaggcggatatgcccgtgaagtgacagtacgtgaattgccgatttcagaaaaccttgcatccgtaaatatgcggctgaagccaggcgccattcgcgagcttcactggcataaagaagcagaatgggcttatatgatttacggaagtgcaagagtcacaattgtagatgaaaaagggcgcagctttattgacgatgtaggtgaaggagacctttggtacttcccgtcaggcttgccgcactccatccaagcgctggatgagggagctgagttcctgctagtgtttgacgatggatcattctctgaaaacagcacgttccagctgacagattggctggcccacactccaaaagaagtcattgctgcgaacttcggcgtgacaaaagaagagatttccaatttgcctggcaaagaaaaatatatatttgaaaaccaacttcctggcagtttaaaagatgatattgtggaagggccgaatggcgaagtgccttatccatttacttaccgccttcttgaacaagagccgatcgaatctgagggaggaaaagtatacattgcagattcgacaaacttcaaagtgtctaaaaccatcgcatcagcgctcgtaacagtagaacccggcgccatgagagaactgcactggcacccgaatacccacgaatggcaatactacatctccggtaaagctagaatgaccgtttttgcatctgacggccatgccagaacgtttaattaccaagccggtgatgtcggatatgtaccatttgcaatgggtcattacgttgaaaacatcggggatgaaccgcttgtctttttagaaatcttcaaagacgaccattatgctgatgtatctttaaaccaatggcttgccatgcttcctgaaacatttgttcaagcgcaccttgacttgggcaaagactttactgatgtgctttcaaaagaaaagcacccagtagtgaaaaagaaatgcagtaaataaaagacttgcggcttgcagagagcactcgttctctgcaagccttcataaggagctgaaccagtgaaacatcaaaacccttcaaaacgcttattgcggctctccataaagtacttgctggccgcagcagcagtggtgttgacctattttgctgtcatctatatattgttttctttagcgggaacgagctaccgctcagcagctcatgtcctgctttttgccgtggtatttcttgttctcggattatgctttgaaccatttgaaaggctgatgatacatagctttacatttttcaagacaggaaaacgtctattcattctccttgccggcatcgtacagctgctatttttgtggatgactgctcatacaacagaccaattgatcagcgacatctggctgtccaccacagaagaaatgattgtcgcagccgtttttttgattttagacaaatgcaactcggctcttcccagctaaaaaaagaacgcattccaattggatgcgttctttttattcatagcgaagcgcgtctacaggctgaagcttcgaagccttgatagacggaagcaagccgaagataatgccgactgccattgaaaagatgagtgctccgacaacagctggaatggagacgataaaaggcatcggaaaaatgaccgtcagcagcttggcgatgccgaagcccgccagcacaccgagtattccgccaatgcttgtcagcacgacagcctcggttaaaaattgaaataaaatcacacgccgcttagcaccgagcgctttcttaattccgatttccctcgtgcgctccgttacggaaacgagcataatattcatgacgccgataccgcccaccaaaagtgaaatactggcgattccgccaagcagcaatgcaaatgactgattaaaggactccacttcctgcgcgatctcctgaagatccattacactgtactctgctttttccagctcagcttctgacagtccctgatttaaaagatctgcagccattacacccgcttcttggatatgctcagaagaatcagcctgcacggcaatctgtgttggcgcgtcaaacccttcaataagcggccacacttttttcggcacgtacaaaaccgggttcgcatagtcgccttcaaacatgctttcctgttgatttttttctttaaaaacaccgacgaccttaaacggcacaccattcatctcaatgtttttatgcagagcttctccgtctggaaacagttcatctctgacagcttcattgatcatcactacttggtgtgtgctgtttaaatcgttttccgtcagctttctcccttcggttattcggattggaaacatgtcgaagtaatcatcgtccactccatacacttggggatacgaaacgtttgttaaatgaaaaacgctcgcgccttctgacaagtaatataaggataatcctttgaccatcggatctgatttgatcgcctttactgtttcttccgctacaggcggcgcggacgcatacgacacctgagggccgccgctctcctcttctccgccagacggctggtagacaacgttgatcgcgttgtttcccatgccgatcatactttgctttaattgctcactttggcccttcagcattgaaacaatcgcgatgattgccgctatgccgataatcacgccgagcattgtcagaatcgatcttaatttatgagaaaaaatggattgaaaggagattcgaatatgttcaagcatggctgatatcccctctctcatctaataccagctctccgtctctgataaaaacggttctgtcagcttttttggcgacgtccgggtcgtgggttatcataataatggtcttgccttcccgatgcagttcagaaaacagtgacaaaatttgttcacttgatttggtatcaagcgccccggtcggttcatcagctaaaataaacctcggctgattgacaagggccctcgctatcgccacccgctgcttttggccgccggacagcttaggcggtttgtaggagaccctgtcttttaatccgaccttttccagcgcttcatatgcccgttgccttctctcttttttcttcactttattgtagatcatcggcagctcgacattttgcagcgcggtgagacgcggcagcaaatggaaagtttgaaacacaaacccgattgattcattgcgaatttcggctaaagccccgtctttccctttcaatatatcgatctggtcaagcgtataggttcctgaggttggcctgtccaaacagccgataatattcattagcgttgactttccagaaccggaaggccccataatagctaaaaactcccccgcctgaacagtcagattgatatgtttcaagattggaacttcttcttttcccagcttgtacgacttcgaaatattattcagtgtcagcattgactgtaacctgctttccttccttgaccgcgggatcaggatagatcacataatcttccggcgtcaggccgctcttaatttccaccatgtcattttcatcagtctctccgatttcaacaggctgcttaaccgctttgtgattctcatcagctttccatacgtacggttcgccgtcatcctgaatgaccatgtcggacggcagcttgatcgtgtccgcatcagcattatcactcatcacttcgatgttgacatgatagccgacttcaagacctttatggctgtctaataaaatggtgaaaggatagttagaggactggggattcatttcttcatcagcaaagctttctgattcttcaccctcgcctgctcccgctggaagcttgccgatcgaggtgacctttcctttccactcgccctcaccgcctgttttcagcgtgaccctgactttgctgccttttttgatcgtgtccattaacagctcattgatttggcttttgaccagatatttgcctgtcgaaacaatctggatatacgggcctgctgcctggtcgcctgttgcaccgtcagcgatatcctgattgacgctttgaacgattccgtcatgcttgcttgtaatgacattggaacctttgtttttcgtcaggccagccagttctttttgatgctgcttcagttcaagctggcttgttttcaaatcgaaattggcttggtcaagttcatcttgaagctgggttttctcttctttccctgcaactttcagcttcttttccgtttccgttattgatttttgcaaacggttgatttgcagatttgtcatttcaatttgcaaattggcttgctccacttcatcagaatgatcctcgccctcatactcaaaaagcttatcgccctttttaacctgatcgccttctttgacgtatgtttttttaatgctgcctttttctgaatctatgtatactttctgctgtttctcaggttcaacctttccagaaaacgtttggcctgattctgaatctcctcccatgtataccgcgaccgattcagcatagggctccgatgatacggcaacttggttcatgtgagtaaaaaagtaaaaaccgccagcgccgatcccagccaatacaagcacaccggcacatatcgcaccgccaataagccattttttcttcttggacacaacgatctcctctttctgtaaactatgtaatattttcgaaacattctaaccaatattatctattaattcaaaaagacttgcaatccttttattgaaatgacggaatcaaatagaaaaattgtattttccaagccgaataaaaaaaatcccggcttcaaaccgggattttttcatacagtaactagctctttttcatttttaatcaagtcatatgtcaagcatacaggtttatttgtacggggatcagtcacgatttcggcatcaatctgaaatacctgcttcaaaatgtctggtgtcatgacctccagagcagttccttccttgatgaccgtgccttttttgagcgcgatcatataatgagaaaaacgagctgcatggttaagatcatgaatgaccattaaaatcgtccgcccttgctctttgttgagtctgtcaagcagctgcagaatttcaagctgatgtgcaagatcaagatacgttgtaggttcatccagcagaagcagttccgtcccttgcgcaagcgccatggcaatccacacgcgttgacgctgtccgcctgacaatgcctcaatcggccgttcagcatattcagccatgcctgtttcttcaagcgcccatttgataatccgtcggtcttcgtcatttaatctgccgaatcctgattgatgcggaaacctgccgtacgacaccaattcgtgcactgttaggccgctcggcgcttcaggtgtctgtggaagaatcgccatatcttttgcaatgtcctttgtagacattttatgaatcgctttgccgtttaaatagacggcacctgcatgtgaacgcataattctggacattgtttttaaaatcgttgatttcccgcagccgttcgggccaattaaggtggtaattttccctttaggaatcgatatatttaaatcctctacaatcgccctgtcgccataaccgattccaagctgttccgttgataatgaattcatattcggccccctcctctaattcgctttcatcaataaataaataaagtaaggcgcacctagcacggaaatgacaagtccgaccggaatttctgatggtgccaatacatttctcgccagcgtatcagcaagcaaaaacaggaatgagccgatgaaggcggagaccggtatcagcgtctggtgacgtggaccggtcagccttctagccacatgcggcgcgatcaatccgagaaacgcaatgccccccgcagctgccacgcatgaagcggcaagagtaaccgctgccagaagaagaatccgtctttccttttcaacagcggtgcccagcccggtcgccaattggtctccgagctgcataatgttcaaatagcgtgccttatataaagtaaacagaagcaagatcacaatccaagggagaatcgcccagatcatattccagttcgccccccatattgagccggatatccaaaccgcggcttgcataaaatcatgagggtccatcttaagctgaaaaatcagcaacagggcattgaatccggcattcacccctatgccgactaaaatcagccgaatcggtgtcacgccttttttccatgccagaatataaatgagaaacgcagcgaggattgctcctgccaaagcactgaatggcagcataaatgttccgaaaaagctgagatctgaagctgacccttgaaaaaagtatataaaaagcactacagcaagtgaaccgccggcgttaattccgagaataccaggctcggcaagttcattttgagacacgctttgcaaaatggctccagctacggagatccctgctccaacaagcaaagaaaggatgatccgaggcagcctgaactcaaataagacaagttcatcacgcgccgttccttggccgaaaaagacctgaagcgttttaagcggtgcaattttgataacgcccaaattgagactgataaaaaagaccaccacgataagcaaaaaggtcacagccattacaataagcggtttgtttgtttttgttttcattacagccctctcctttcacgacgtgccaaataaaagaaaaagggaacgccgatcagagaagttagcgcaccgacaggcgtttcaaagggcgcatttacgagtctggccgctatgtcagcaaaaacaagcaaaacagcaccgagcaccgccgagcaaggaatgatccaccgataatccacaccgaccaaaaaacgggtaatatgcggaatgatcagcccgataaatgcaatggtgccggcaatggaaaccgcagctccggtcagaattactacaataagcatgcccaccagtttcactgctgatgtatattgtccaagccctttcgccagatcgtcaccgagacttaacactgtcacagatcgggcgataaaaaacgcgagcgttaaaccgacagcccctgcaataagcaaaagctggacccccgaccatttcacacccgctaccccgccagcgtaccaaaagctgatatcctgagcgacatcaaagcggattgcaatggcagttgaaatgccggtaaagaaataagtaactgccgtacccgccagagcaagctttacaggcgtaagtccgccccttgaaaacaagccgatgcccattaccgtcgatgcccccagccccgctcccgcaaaggaccatagcacaagccccattgcagaaagtccgggaaaaaaggcaaacgcaatcgaaaccgcaaacgcagagcctgatgtcacacccataatcgaaggctctgccaaagggtttctcgtcatcccctgcatgattgctcccgacactgccaacaatgcgcctacaagcgcggcagccgccgttctcggaagccgaagatcatgtataatttggtgagatgtctttgtcggctgataatgaaaaatggcgtcccatacagtgcgcaaatgaatatccgctgcaccgagggatatggataaaaatgcgccaaggcaaagcaggcatagacctgcaataaggacgatgaccgcgccatatgtccttgacgtccattggatttcttctgatgcagtccgtatatttttatgttgactcaactgccgtacttcctttctgttactgataatgattatcaattgctgtttcagtatatcacttttttcagctgatttaatagagtgttttgaacaaaaatgaaaatgcatttgcaaaaatatcgtgtcaaccggcacttgcagtggtataatcacagatgataatgattctctttttcatctattttttagaaagaaggtatgagatatgacccatatatacaagaaactcggagccgcgttttttgccctgttattgattgcagcgctggcagcctgcgggaataactcagaaagcaaaggttctgcctctgattcaaaaggcgcagaaacctttacatacaaggctgaaaacggaaatgtaaaaatcccgaagcatcctaaacgggtggttgtcatggcagacggctattacggctacttcaaaacactcggcatcaacgttgtcggtgcgcctgagaatgtatttaaaaacccttactacaaaggaaaaaccgacggcgttgaaaacatcggagacggcacttcggttgaaaaggtcattgatttgaaccctgacctgattatcgtctggacaacacagggcgctgatattaaaaagcttgaaaaaattgcgccgactgtcgcagtaaaatacgataagctcgacaacatcgaacagctgaaagaatttgcaaaaatgacgggaactgaagataaagctgaaaaatggctggccaagtgggataaaaaagttgcggccgctaaaacaaaaatcaaaaaagcggtcggtgacaaaaccatttccattatgcaaacgaacggaaaagacatttacgtattcggtaaagactttggaagaggcggaagcatcatttacaaagaccttggcctgcaggctacaaagctgacaaaagaaaaagccattgaccaggggccaggttatacaagtatttcattagagaagctccctgactttgccggggattacattttcgcgggcccatggcaatcaggcggtgatgatggcggcgtttttgaaagctccatttggaagaacctgaatgccgttaaaaatggccatgtctacaagatggatccgatcggtttctatttctctgacccgatttcattagaaggacaactgaagtttattacggaaagcttgactaaataaacaaaagagccgcctgcccgcggctcttttgcaaatttataaggaacagctcaatttgaatcatatcagatattttctttgagccattcatattaagctgcatcctcatcgcgatcagtttttttatgctggagagactgaaaaacgttttttgcatattcgattgtgccttaaagtttttctttcgatttcagctttcctgtcagctaggttaacgaacggattcttaacagaagaaattgtgattttataaaaaagacacctgagcaaatcaggtgtcttttcattatgcttgtttttctttctggaactttttactcacaaatgtataaacgattaagccgacaaagaataaaccgatgccgaggataaatgtcgttaaatctgctgtgcctgttacgataacaaacacggagtatgcacacgccagtatcgcgatcaatccgtctcttacacgggagcctttcagctggtcatacgtttcacctttgatgactaccttcaagctgtagattgcagataccagatacggaattaaatatgcgagtgtagccgctgtcgttaaaaatgtaaatgcgtcacttattgtccgggaaataaccgagaaaatgaagacctgtgacatgacgtttgtaataatgagtgcaatgaccggacttccctttttattcgtttttgcaaaaaatgccgggaaatctcctgctttagcggcttggtatggcacctcagagccaagcaaaatccagccgagcatcgttccgaataaacaaaggatagccaaaagcgccataatcacgcttcccgcgtttccaacaatcgcatagagtacatcaacaaatggtttttcagagccgacaagcttatcatgcggcagaacacccatcgtaattaaagtcacaataatatatatgctcaaggcaatcagcaagccggtaattgtcgcacgtttcacatcacgctgagagcgcgcacggccggacaggatcaccgcggattcaattccgacaaacgcccacagtgtagaaatcgcggcgttatgaacctggccgccaattccaatgcttgtgccgttttctccttgaaccgggaaataaaaatgaccgaataatgtcgtttgaaacacaaacaaaccggcaacgataaagaagacaaaacctaatactttagaaagcgttgtgacaaagtttaatttacttgcgccgttaatgctggcaacaagaatcgcgtgcgttccccataacaagatcgtacatacggcaaacgtcagtaattggccgagtgtcacctcttgcccgccgatcgaaaacatctcacgtttatcaaccaagatcgggaagaacgaagtcaagtaaccggcgagacttgtgatgatcgccacgttgctgatccagctcgccacccagtagccccacaccattgtgaaaccggcagcgttgccttttttcgggtcagaaaacagcgctcttgcataactttgcggtcccgctgtcagttcaggcttgcgaatggacaagtgtccgaacacaagtgcaatcatcagcacgccggcacctgtcaaaagccaggcggacgtagctccaaacggactcgcaattgaagcaagcgagctcggcaaggagaaaattcctgatccaaccatatttccaacgacaaacgccgttaataaccaaaaaccccatttttttgtctgttccattccagtacctccatgattctttgtacggaccagaccccgagatcatataaacgcaaaaaaagcctgaacaaaagtccatgcttaaagaaacacacacccttgatctccggatagccctccgcgaaaaagcacgcggcagtcctgcacttattcagatacagtcccagcatagagaaggatcggctttctccacacttcggcgctgatgccttttacacatgtttaacagcccctgtcagcctggcatgtgtgacttatcatccgcgcaacctctacctcactgagaaagagtgaggatttaattattcagttactcccagaaggttatcaaagaaaggatgatctgtcaaagggaacagatggaaaatacggatagagccaagccctatccgcatgtgattatcgattatttttctttttttgcacagcttcttgaagcggatcatcttttagagctgaaccagcatcttcaagagctccttggattacgtttttttctttttcggaacgttttcctttatctttattaaagaaacccattcgtatcacctcttttaaaaaataggtacatgtttaagatgcctcttttatgaaaaattatgcgggatattttttatcgtccaaagtcctgttgatcaaacatacattctcttgatatatttgtaattcagagattttttgcaaaagataaaaggagaagcggcaaatgacaggaaaaacacacatcatgggaggcatcgcttcttgtacggcagcggcttattattatggatttgatccagtgcttatggctgcgtcaggcgcggttggagcattaatacccgatatctgccacacacaaagcaaaatcgggagaaaatttcctattttatcgaaagtggtcagctccgtttttggccatcgtacatttacacacagcttgctgtttatgctcatcatgttttttatcacttctacatacattccagataaaaacatatcagccggcctgatgatcggaatggcaagccacttgattcttgacgcttggacggtaaacggaatcaaattattattcccttcaacgatccgcgttcggcttccattatatatgaagacaggcagtttttctgagcagctcgtgctagctggcctgacccttgcttcatgttactacttttatatgctgtttcatgggcgcatgttttaaacatgagtgctgagacttgtctgaaccggctgtttttagtaggttttacttaagaagcatttcatgcagatgatcaagaaaacgcgaggagtcatattgatgaaaggaaccttttttcacaatcagcggtttttatgtttttcgatcttatttatgtggatcaaaacgtatgtgatatataaactcggctttgatttgcaaatcgatactctgttggaggagctaatgctgctggtcaacccgctcagctttattcttcctttattcgggatcggcctgtttctaaaagaaaacaagcagcgggcctttttgctgatcgccaatttggttctgactgttatcttgatctctaatacgattttttacggcttttatatcgattttattaccatcccggttttatttcaggccagcaacatgagcgatatgggcagcagtgtaaaagaactgttccatcctctgtttatcgccctgtttgtggatttggtttttctgctgctgttcgccagaaaaaccaaacacccacagacaaaagccgctccccgcacgatcaaacggtactatgcagcttcctgcggcatgcttttatgcacactggcacttgcagaagtacagcagccgaagcttttggcacattcttttgaccgggaaatgctagtcaaaagcatcggtctgtttcagttccatatttacgatacaatttctcagactgttaatatcagcgcgaaagcttttgccgatgaagacagtataactgccattaaaaactacacagaggctgattacagcaagcctgatcaaagcaaattcggtcttgcaaaggggcgcaatgtcatctttgtaacacttgaatcgacccaaagctttgttctgaatgaaaaagtaaatggaaaagaaattaccccatttatgaatgatctcataaaaaaaagctattcctttgatcatttctatcagcaaacagaacaaggaaaaacatcagattcagaatttatcgtcgctaactcactgtatccttcccttagcggcgccgtctttttcacgaaaagcgaccatcaatttcatacgatgtataaatcgctgaaacagcacgattattattcagccgtctttcatgctaaccataaaacattttggaacagagatgtcatgtacgatacgtttggcattgaccgcttttttgatgttgatgattttcatgtcactcccgggacatcgacaagctggggcttaaaagacaaagaatttttagagcagtccgccgaaaagctgaaaagcctgccacagccgttctacagcagttttatcacgttaacgaatcattttccgtttgagattgatgaaaaggatcagctgatagatgaattcgattcaagcagtgatctgttaaaccgctatgtgaccacggttcgctatgaggatgaagcattgaggcattttatcaaaaaactgaaagacgaaggcttatacgaaaattcgatgatcgtatttatgggagatcattacggcatttctgaagcccataacgaggcaatggctgagtttttagggaaagacgaaatcacaccgtatgacaacgttcagctccagcgggtgccgtttatcatacatatcccgggaatcaccgatcaaaagccggaaaccatccctgatgccgggggacaggtcgacgtcaggccgacgctgatgcatttgctcggcgttgagacaaaaggcgatatccaattcggcaatgatttgctgtcgggcgaccgcaccccattcgccgttctgcgaaacggcagctttattacgaacgattatatatacacaaagaacacgtgctatagccaaaaaacaggtgaagtgctggaagatcaggatgcgtgcctcccttataaggagaaagcaaacgaagaactgtctttctctgataaaattttaaatggtgacctgctcaggttttccgaatgaaaaaaatccctctatcaagagggattttttacgtttccaatatcaccttgccagtcagcttcgtttcatagccgtttaattgagacaaattcgccttgtattcctcagaattcaaaatctccttcacggccttaagcagctgctcatgttttttcaaaacgacaatatcatattgttcgtcgatgagcgggataaaatcaacactgcccatatgtgccgcgtgctgtgccccgattcccgcgtcagcctgtccgcttgaaacttgtgaagcggcagcgtaatgatcggtcacgatatcgtcgtatccctttacatcagccggattcacaccaagcaagccaagctgttcatcaaggagcacccttgcgccagaacccttttccctgttgatgatccggatatcggctcttttcaagtctttccagccttgaatgtttttcggattccctttttgcacatacagtcctgctttccggagaacgacattgatgagacaaaacggttcacctgtcaagatccgtttcacataaggagcgttatactggcccgtttcagcatcgtacaaatggaggctgacaatgtcacacttgccttgatacatatcaatcaggctgtttaagcttcctttgtatttacggagcggcgtctcttgaatggcattctccaaatgcttgctgagaagatccatcgaaatgtcctgtccgctgatcatgacattcggtctgccgtccggctcagcctcctgcacctgtttcggtgcttctgttgcagcgatgggctgagacattctcatattcgttttatattgctttaaatcttcttcatccacacgcatctgccttccgacacgataagcaggcagcacgccttttttaatcaagtcataaacggtcagctttgataccttcagcagacctgcaacttcttctatcgtataggaagaggtttcattcatcatcatcactctcctattttattataccttttcgttgaatgtaaaaaaacccacataaaccaaacataatcagttataattagttatatctaatgataaggggtgcaatcatgtttaagaagtattctattttcatcgcagccttaaccgcttttctgcttgcagcaggctgttcttcaaaccagtcttcaacggacagcgagaaaaaagtaacgttaactatctcagctgccgccagcgcgcaggatgcacttgaggaaatccaaaaaaattatgaaaaagagcatcaaagtattaccatccaagataactatggctcatccggcgccttgcaaaaacagatttctcaaggagcaggagcagatctgttcttctcagctgctgaggataaatttaaaaagctggtggatgatggagatatcgcaaaaaaagacagcactgatttagtcggtaatgaaattgtgctggtcgtaccgaaaaacggagattcacctgtgacaagcttcagcaatctggctgaatcagaaaaaatcgctctcggcacgccggaatccgtaccggcaggagcttatgggaaagaatcactgacaaagctgtctctatgggacaaagtgaaggataaaattgtgtatggaaaagacgttcgccaagttctttcttatgttgaaactggcaatgtagacgcaggtattgtttataaaacagatgccctggtctcgaaaaaggtcaacattatcgacgaggcaaaagcagatacacacagcccaattatctatccgttaggaatcgtaaaagatacaaaacaccgtaaggaagcgaaggaattttacgaatacctgcaatctgatgaagcaatgaaagtatttgagaaatatggctttactgccaagtagcataagcgcttcagaatttttcacacccgttgtgctttcctttcaggtggcggcagttgccggaattgttgtcattattctcggaacacttgctggagcatggatgtcacgggcatcatttttcggaaaaacggcactcgaaacatgttttatgcttccgctcgttcttccgcctactgttgtcggttttattttgatcgtcattttcggaaagcacagcttcatcggacaagccatcgagtggattttccagcagcctgtcattttcacctggtgggccgctgtgatcgcctcggctgttgtagcctttccgcttatgtatcaatcagccaaaaccggatttgctgacattgatcccgatatacaaggtgcggcaatggtagacggcgctagcagatggaaagtgtttatccatatctccgtcccgcttgcctatccttcgttactgaccggaagcatcctcagccttgcgcgggcgctcggagaatttggcgcaacactcatgtttgcaggaaacatccccggtgttacgcaaacactgccgacggcgatatatgtcgcattggattccggcaacaatacccttgcttgggcgtgggtcgtctgtattgttgtcatttcctttttgatgctgtttttcattcaacagaaaaaaacgcactaaaaaaactccccataacagggagttttttgattaaaacagaagctcatcaggatttgggccgacacgctcatctttatttaatgcgtcaattttgtccatgtcttcttgagacaattcgaaatcaaaaatatcagcgttttcgatgatacggtgttctttaatggattttggaatggttacaacttcatgctgcagatcccagcgcaaaatcacttgagccacagatttattgtgtttttcagcaatctgtgtcagtacttcgttatccaaaagctgtccctgcatgagcggagaccacgcttccagctgaatgccttgcgctttgcagtaatctcttaattctttttgcgtcaagcgagggtgaaactcaacttggttcaccatcggtttgatttcagcatctttcaacagctcttctaaatgatgaacttggaagttgctgacgccgatcgcgcggattttgccgtctttgtacagcttttcaagcgcgcgccatgtatctttatatttatctttgccaggccagtggatcaaatataaatctaagtaatcaagctgcaatctttccagactcttttcaaaggcagcaagcgttgtttcgtagccttgatcttcattccacacttttgatgtgatgaagagctcttctcttgccacaccggattctttaatcccgatgccaacgccttcttcatttttgtagatcgctgctgtatcaatgctgcgatagccatttttaattgccgctttcactgattcagtcgcttcattaccattttctactttaaaaacacccagaccgaaccaaggcatttcaactccgttatgtaactttacagtatcttttaaacttgttggcacttgaacatccaccctttcactgaaatgtaagcgtctatattatctcacattcctctcagccgataccaataatacgcttaagaccctctttttgcttcttttttcacagcacaggcaaatccaaacactatttttttcctattttaacaatattgagattacaaatacattgagcagggtatgcgtgtagtgtaaccaaatgaaaacaaaggaggaaacaacttgaaacgtattcgtatcccaatgacacttgctcttggtgccgctttgacaattgcccctttgtcctttgcttccgctgaagaaaatcctgctccgaagatgtcgcagacaactgctgctggaacaactgccgctgatgtaggtttaaacgtcaatctggatgtacttggaattgccaaccagatcgctgatgccatcaaatccgcacagaacagggatgggtttgtgaaaaacctcatggagtcttccttctacgcatccggccaaaaatataatgtcatggtctttaatttaagccaggaatatgaagatcatttgaacggtgtgcaattttacggctcagccgtttacgacggcattacgtatggcatttgggtatttgaagatggaacctttacaaacaaaggcgatggcggctggatcaactgggccttcagaggctggttcgaccgggatggcagcactgtcgcatttcatcgcccttaatatagaaaaaagctggcgctctaacgccagcttttttgctgcatttattcgccgccttcaagcatggcggcttcgacatcattaatgtattggcgaagctcatgggagatgtcccgggaaatttctctttcctcgaaaagtgtttgaatttcatttctgatcgcctgtacagccttcagcttcacttccagcttctgattttcaaaatgggcgcttgatttcagctcatgatggctgtgctccagcctgaaaattaactgtttatagaatgtaatgacagataaaaacacttctttatgctcttccgtcttgtgtttttccagatattctatcgctgcttttgccgttttcactcttgttgcccgtatcaatcccgcttcatttaaaatcgacatctccggctttttatgttcaccgaagaaaatccaatacatcagcctcttgagccttgtttttgataatccgactttaaacgggttcgcatacaaaatttccaactcgttaaatcgttcttgcagcacatttgctgtttcttccgggatgtctccccgctccagcattttcatcagcgcctcttgctctgccttaaccccttgggcacggactttacgctcgtgctttttgatgcgattagacgatgtatattgctgaaaacgaagatttttcattttctcattgtattcagctatcaccgcaagcgaggccgttttgtttgtctcattcatgtcctctttaatcgtttgaagggctgttttgatcaatttgcgtctcgccgtcagcagcttcttgtttcgttcctcgtcctcttcttctttttcagtcagaatcggcagcacaacggtagcaatgacaagcgtgcataaaatgacgccggctgctaaaaagagaatcagatttctttccggaaacggcgtgccgtcctccaggaaatacggaatggaaaaagaacctgcaagcgttactgctccacgcacaccggaaatcgaaattaacagcgtcgaacgaagacccggtttatagatgttctgatctttattaaagaaccatttgccgttccagaagaacagcacccacaggaatctcaggagcattaacgtaaatgtgatgactaggatatagccgatcaccttcatgttgctgatggcagtgtcgttaaagataacagaaataacatcagggatttgcgtgccgagaataacgaagaccagaccgttcaaaataaataaaataatgttccacgtacttgaggagacaatttgcagcttgatcatcgttgattccagacgatcctgttcaaccgcatgggtaataccgccagccacaacagctaaaatgccggaaacgccgatttcttcagctgccaaataaatcacaaacggcgtcagaatttgaatcagcatatgcatcgtgacatcctgcatgccaaggcggcgcagaaataggcgaaaacgaataatcaaaaatgaaatgacaaccccgcacagcaagcctccgagagaaataaagacaaagctgacagccgcttgtgctaatgaaaatgcgccagtcactgccgctgcaatcgcaaacttaaaggccaccagacctgatgcgtcattcatcagcccctcaccttccagcaggcgaagaatcccttttggcattttcactcttcctgataatgcgctgacagcgacgacatcagtcggtgaaagaatggccgcaagtccaaaggccgctgccagcggaatagcaggaatcatccagtgaatcgtgtagccgcctacaatcacagtcgcaaatacaaggccgagtgcaagcaataaaatcggagcccttaaattccaaagctctgcccgcggtgtcctctttccatcattaaatagcagaggcgcgataaaaagaacaaaaaacaattcggtgtttaattcaaaatgaagtccctgtggaaatgaggcggcaagaatcccaagagccacttgaatcagcggcaccggaataaacggaataaaccggttcacgatattagaaatcgcaataatcgttaataatacgagcacaactaaaaatatgtccaaatgcatgacctccttcgtctgttgtgtgtcggcatgatgagccaaaaaatctgtttgtctaaaagcccttgagctagggtggccttgcatccgctatgtggttccgcaggagttctctccacacttgtcttcttttatagtaccctttttagggtattttttctcatgatatgctcacagtgaacttttttgcagcagagcaaattacagaaaaaagagacaggaagctactccctgtctctcgtctttctttctcaatcatgaaaattcgtaccgtcagttgttgctttgataatgcccgcgcggatgacaaagtcaccgaaatgctcgccttcctcacgttctttcgcatagcgggaaagaaggatgcgcagctcgcttaaaatgtctgcttcaccgatgttttcacggtacattttgcttaaacggcttccgtcaaacgcagcgccaagatacatattatatttgcccggcgcctttccgataaatccgatctcaccgagtgcatgacgtgcacagccgttcggacaccctgtcatgcgaatggtgatttcctgatcacgaaggccgttttcgtcaataatctcttcaatcttatctaacagggtcggcaaataacgttctgcttcggccattgccaatccgcaggtcggaagagcgacgcatgccatcgagctgcggcgaagtgctgaatagtgcttgccgtcagttagtccgtactgttcaattaaagcactgatttcttcttttttatcgcttgaaacgttcgcaatcattaagttctgattggctgtcagccggaactcacctgtatgaactttggcgatttcccgcaagccagtcatcagcttataatcatcgtaatccgttatacggccgccttcgacaaacagcgtgaaatgccatttatcctcgatgccttccacccagccatagcggtcgccgttatgatcgaaatgatacggcttcgcttcttccaggctccagccgagacggttttccaattcttcttttacgttttctaaaccgaggcggtcaactgtgtatttgaaccgcgcatttttacggacagaacggttgccgtaatcacgctgaatcgtaatcgttttttcagcaacgtcatacatttgctcaggccggcagaatccgatcaccttggctaattgcggatatgtcgcagtatcgccatgcgtcattcccataccgccgccgattgccacgttaaaaccgatcagcttgccatcctcgacaatcgcaatgaatccgagatcttgtgaaaagacgtcaatatcattagacggcggaacggcaataccgattttaaacttccgcggcagatagagcggtccgtacattggctcgacttcttcctccggcgtgccggcaactctttcctcatcaagccaaatttcatgatatgctctcgtccgcggcagcagatcatcacttaattttttagaccactcgtatacctctgagtggatttcagattgataagggtttgatgcacacatgacgttacggtttacgtctccgcaggctgcgatcgtatccaaaagtgctgagtggatcgtctgaatggttttcttcatgttccatttcagaatcccgtgcatttggaacgtttcacgtgtcgtcaattttaatgtgccgttcccgtatttctgggacaggtcatccatgacaagccattgttcaggcgtcgagacgcccccgggcatacgcacgcgcagcatgaactgatatgcgggctcaagcttctgcttttggcgttcatttcggaggtcgcggtcatcctgcaaataactgccgtggtgtttcatcaggcggttatcatcatccggaattcccgcactgattcgatcgagcatcacttctttcagcgtgccgcgcaaataatcactttcttttttaatgcgttcaacatcacttggagagccgtccggtgcttttagaattttggtcaccatgttgaaaaactcctttcaagtcaaatcaatatacatcacgctgatagcgtttttgctgctgcatatcggcaagataagcctccgcttcttcgcggctcatattgccttctttttcgataatttcaagcaatgtgttatggacgtcatgcgccatgtgcttttcatctccgcaaatgtaaacagccgctccttcttgaagccattcaaacaattctgcgctatgttcaagcatgcggtgctgcacatatactttttcttccgtatcacgtgagaacgccacatccatttttgtcagcacaccgtctttgagccaattctgccactctgtctggtaaaggaaatccgtgacaaagtgctgatcgccaaagaacatccatgcctttccttccgctcccgtctcctcacgctcctgcataaaggaacggaaaggtgcgacgcctgtcccagggcccaccatgataatcggtgtttcagggtctttcggaagcttaaagttttgattgtgctgtacataaaccggcagtgtgtctcccggctgcagacgttccgcgcacaaaatcgagcagacgccttttcgttcacggccgtgcgcatcgtagcggactgcgccgattgttaaatgcacttcatccggatttgcggataaactgcttgcaatcgaataaaggcgggcaggcatttttcgcaaaatcgagacaaactcctgcgcagatacactaaatgggccatagtcacggacgagatcaagcaaatcgcgcccttcaatataggcttttacattctcctcatttcccggggctaaaagctctctaagctcatcgttccctgtcagctgggctgcctgttcaagaagcggttttgtgagaacggtaatctcatagtgagaaatcagcgcttctttcagcggacggacatcaccttgcttattaagcgtcacaatttcttccgggtcccaattcatttccttaaggagcagctcgacaagttccggatcgttttctggatagacgccgaggctgtcaccaggctcgtaagtcaggcctgatccttcaagagacagctccacatggcgtgtttctttatttgatcctctgccgtttaaatttaaattttctaacacttcagcccgaaacgggtttgttctggaatacgaagactcaccggtttgtgacgcagccgccggcgcaggcgcggcggttccgcccccagcttcatttaatcccttcaatacaccctcaagccattcggctgccggttcatcatagtcaagatcgcaatcaacgcgcggagaaatccgttttccgccgagttcttctaagcgctgatcaaattctttccctgtctggcagaaaaattcgtacgaactgtcaccaagcgccaaaacggaaaagcgcaggtcttcaagcttaggcgcccgtcttccgtgcagaaattcatgaaacgacagcgcgttatcaggcggctcgccttctccatgcgtactgacgacgattaaaagattggttaccttcttcagctgattcggcttaaaatcgctcatggatgagacggtcacttgaaaaccgctctgttcaagctgcttgccggcattttccgcaagcccctgtgcgtttcccgtctgtgaaccataaagaacggtcacttcttttgaaacggccggtgcttccgcagacacagctgccgccggcgcacccgcagtttcttgggcggaaacagattgcgcggataagtatccgctcagccagattttctgggattcggtcaaggtcggcagaaggcggttaaggagctctgcctgctcctgattaaacggactgttcattacctgaagttgcaacgtatccacctcacaaagttataaactgatcgaaaattgcatctaattgaactttaccggaatactaggcttaagtaaaatatatttacatgatgataactattaagaatcctaatgataaaacggctatgcttcatgtaaatagaaaaaagagaaggactcccttctcttcattcagccatctgatataagtgaggcggcacagcggttacaaacggactggcttcacctgtataaaatactgccagcatgtgcatcgcacgggtgcacgcagtatataaaagcctgcggtcgtgctctgtatgatagtgttcttcagatgcatcatagacaagcactgcgtcaaattcaattcccttcgctaaatacaccggaatcacgcaaacacccttttgaaatggttgattttctttatgaatcaggcgaacatctgtatattcactcatgtgggcgtgcgcctgtatgcattgctgcgcagtcttgcagatgacggctattgtttcgcgcccttttttcttgagccggccaatttcttgcgcgagcttttggcaaaggctctcatgtccttcagttttgacaacgagcggcatttccccgcttctattaaacggctcaatatccgctccatattgaagcatcgctttggtaaactcgacaatctgccttgttgatctgtatgttctctttaaacgaacatactcagcaggctcatcctcaaagcacgcatccatacgctgatccccgtgtatggtatgcgcgtagatggactgattgatatcaccgagcactgtcatgctggcagccggaaaaatgcttctcatgtaaaccatctgaaacggtgaatagtcctgagcttcgtcaataaatagatgtttgatcttcgtatttttctttctgccctcaatcagatcctgcatataaagaaacggtgctgcgtcctcatagagcaatttattatccgtaaatgccgaactggtcagctcacctatcgcgtccatcttctcatgctgaaattttcctccccagccagaaaacaattgcaaataaagttgtgtaacatcaagaaatgcaaggagtctgaccgcctgtttgagcggtttgaaagcttttttcacaatgatggcggcaagcagctgctgctctctttgataatcgttaaacgtactctcgctgaaccgtttcctttcttgcagttttctgtacacgtccaagtagtcctctttgtcaagcagctcagcttcatgaacaacccaatcctttcgccgttcctttttctcaagcttgttaagctcactcagcagccacttcgcggtttgctccatccgattcggaatggagtgattttgatccaatgagtaaaaataggattgaatttgctcctttgtgatcagcttttgtccgcggaatataatatttttaaaaatcatcccttcagaggaaagccgtgtgacgtattcattaatgaattgctgaaaggataaacccgccttccatgtgattcccgcaagccttgttggaaaatcgccttccttagtttcggtcaggcaatattcgagctgatcaaaggcgctttcacatttgaacttgcggccaagacgatgctcgatatattcctgaaacgtcgcctgctccatattctcttctcctaactcaggcaaaacagaggatacatagctgttaaataagaagttgggagaaaacaaaacgatttgtccggcatcaatgacgccgcggtgcctgtataacaaataagcgacacgctgaagcgcagccgatgttttcccgctgccagccgctccctgcacgatcaggatcttgcttttttcattacggataatctgattttgttctttctgaatcgtagacacgatgtttttcatttgggtatcggagtgatggcttaatacctcttgcagcatttcatcgccaatcgtcatatcggtattaaacatcgccttgagagtgccgtttttgatcataaactggcgtttcagcaccatttccccttctatcgtttcaccgggcacctcgtactccgcttttcctggagaataattgtagtacaaacttgatatcggcgccctccagtcatagatcagaaagtgttcctctttctcatccaaacaggaagctaaaccgatataaattcgctctgcctccgcctcgccgttttcaataaaatcaatccggccgaaataaggcgattttttcaattgatgaattcgtttgagctgctgatccatgcgccgatgattctgttcccgatcagacagcagctctgcctgctgcttaatgcttgccatcgtttcaatcgcttcatgggcatcatcaaaattaaccttaacatcctcccaaaagctttttcttaatccgatgatatcatgcttcaacccgcccgcagacgtttccagaaaccgctcttttttttcgagctccttcagcacctcatctattctcgactgctcttccttccattccttatcctgctgattcatgaacggcacctccagaaaatagttgacaaacatagatgaaatactgtaaaatataattggatacatatattaaatatatgatgtaaactggcaaatacaatttataatagcacattcacccaataccaatcaaggtttgggttatttatatgcagaaaaaaccgatttcaactcgaaatcggttttttctcttatgatttcacattgatcactgttggacgtgcttttcttaggttgcgaatcttctctttcatcagtatcgattccttattcctttcaatcttcgatataatatatctttttcattttaaaaacaccgcagagctttaccgtatttgtctgttcatctaacgtgaagaatgactaaactggctgttattgtcatcttccataaagcaactacatctctgctatcgtatctatagtcgcagtaaaatagtcatttttcacccattttcgacacatttcaacaaattaaagtttttcatttgggagaataggacgatgttacattatttctctcggtttatgatatgaacatgaagaaagaaccagaattagttaggaggaaatactcagtgaagaaaaagctatctatgttgttgctggcattcgtcgtagccgtaacaagttttacgtcaattgacctagtaaacaacaaagcggaagctaaagattgggttaaaaaaggtcaaatatggagtactcattaccattcgggctcatttaaaaactatacttactcgccaacttttcatatttattatccaggacgaggaacttgggccaacatgacatcaaatggatcaggcagcgggaaaattacagcaactctgcaacaaaagacaaataaaggctggaaaaatgttaaaactttttacgcaacgaaaaaaggctctacaaatttaagttacaaacaagcttctaaaagctacaaaacaaaatacagattcaaattcactaacacaggaactaaaaaaaccatcagctataccttttgggctacctattaatttcaaatagctttgctctgcgcggtcagcattcgaaaaggactttttatttgatcccggcaggctaccataaaagaaacctctccgtcatggagaggtttcttttattttactgactatctaagcgaaaagaacggtttggcagcttccaattaaacatataggaacaaacccggcaaacaacgagcacgaaaaacagaacgtataagccgaacgagttccccatccagcccaagccgacgattaaaccgccgagagccgcccagactgcataaatttctgccttcagcacaagcggtttgcgaccggcaagaaggtcgcggatgattccgcccccgcttcccgtcagcaccgcagccacgatcacggcactaagcggatggcccattttgacagcatacagtgcgccttggatagcaaaggcagcgaggccgatcgcatctgataaattgccccacttattccaatgcttcagcagcagcttcggaaacagaaacacaattgtaatagataaaagcgcgatttgaaagtacgctccctgctcccatagcgctgacaccggaacaccgatcagcaaattgcggatcgctcctcctccaaaagctgtgacaatccctaatatataaactcctaaaatatcatattcctcttccatcgcaacaattgcgccgctgactgcaaacgcaatgatgccaatcacactaagcagctcccaagccattctgatgactcccttttatgtttgttaaattttctgacgacctctagattttataatcgctccagcgtaaaatcaataacatttttatgagaaaaaaagataaatttagagggaatacggctattgctgatggacatgagtttgcgaaattaaaaaagcgcccggcatacgcgggcgctttttttgttattcagatttttcgcctttcagcaggcacataaaaatgataatcaggataaaagcaatcagggccaggaatggaatcgtaataaaaccaaaccagttaatatattggcccgagcacggcacgccgcttacacacggcttaatgccgctaaaaccgggcactttttgttctaagtaatgcatggttgaaatgaatgcccctataatcgccatcgggagcacatattttttcactcgtgtgtccccttgaaaggtggcgatgcctaaaatcagaacgagcggatacatgaggatacgctggtaccagcacagttcacatggaataaactttctgatttcactgaaatacaggctgcccagcatagcgataagagccacaacccaggaagcatataaaaatacgattctatttttcatatcgttacttccctttcagctctttttctattgtctctttgatttcatcataatccgcaaaatttttgatcactttatcattgacgtaaattgtcggtgttgcctgtatgttcattttttgattaaggtcagaatccttttccacttgagaagcgaatgtttccttatcaagattttccttgagcgtctcaggttttatctttgtggtgctttttgcaagatcaccaaggaggcctggggttacccattcctgttccgtatccggctgtttttcgaacagcttttcatggaaatcccagaaagagtcagggtcttccttccatacttcttcagatgcaagagccgctaatcttgaaccttttccatggaacatgacgttcacgaaagaaaatttcacatcgcccttatcaataaagtctttttgtatttttggaaagatgtcactgttaaacaccttgcaagacggacatttgtaatctccgaattctactacagttaccggtgcatcgtccttgccaagcacaggctgccctttgatagacggctgtccggaaaccgcatcattgccttgttccgttttgttattaatgatgacaatggctgctagcaatacaacaaccacaaccgtaaggatgaccgcgaatttcgcagaagactgctgtttctttttcactccgacacctcatcgttttaaaattaaaaaagaagcggatcgcaattgatccacttctttattttaacaagacaagcgccgataagaaaaccccgaaaaaatgaattctctccgacaatttatttgtttttgagacgcatgacgcgcatagcgtttgccacagcgagcagtgtaacaccgacatctgagaaaaccgcttcccacatggttgcaattccaaatgctccaagaatgagaaagatcgctttcacacctaaagcaaagccgatgttttgccacacgattcgccgtgtccgtttcgcaatccgaatcgcttctgctatttttgacggctgatctgtcatcagcacgatgtctgcggcttctaccgcggcgtctgacccaaggcctcccatcgcaacccctatatctgcgcgtgcaagcaccggcgtatcattgatgccgtcaccgacaaaaatgagtttttcactaggcaaaagcttagcttctaatgcttcgacctgcgccactttatcttgcggcagcagctctgcatatacctcaccaatcccaagctgttttccgacggcttctcccgtttgtttcgaatcacccgtcagcatagctgtctgtttgatcccaagcgactttagatcagcaaccgcctgtgctgcgtcttcctttacttcatccgctatgatgattgctccggcatagcgttgatcaacagcaacgtgtacgattgttccagcattttcatccgggacatcctcaatttgttctctttccatgagctttttattcccggcaaggatctcagttccatttacctttgcaaaaatgccgtggccggggatttcttcgtatgactctatctcatcggaggaaagcattttcccgtaagctttacgcacagattcagcaatcggatgctgtgaatgaagctcagcgtatgccgccgcttcaagtaatctatcctttgtaaaaccttccgcgggtttgatttctgtcacttcaaagctgccttttgttagtgttcccgttttatcaaacaccgcgtatttgacttgattcaaagcttctaaataattgcttccctttacaagcactccggcctttgaggccgctccgattccgccgaagaaaccgagcggaatggagacaacaagcgcacaaggacaagaaatcactaaaaagataagcgcgcggtacacccaatcggaaagcgcggcgccagaaagaacaagcggcggaacaaaggccagcaataccgcgatgatcacaacagcaggtgtataatacttggcaaacttcgtgataaagttttctgtccgggctttacggctgctcgcattctgaaccaagtctaatatttttgatactgctgattcttgatagccctttgtgacttcaatatgcagaacgccgttttgattgataaagcctgacattacatcttgtcctaccgcagcttttctcggaacggactcacctgttaaagcagatgtatcaaccatcgctgacccttgcacgaccttaccgtccaggggtatgctttctcccggattaaccacaatgatgtctcctgtctgaacgtcctccggggaaacctgttcgatgctgttctttgttttgagattggcgtaatcaggccgtatgtccattaacacactaattgattttctggaacggctgaccgcggcaccttgaaaaagctcaccgatttgataaaacagcataacggcgacgccctcagggtattgctgaatcagaaaggcgccgattgtggcaagagccattaagaaatgctcatcaaacacctgaccgcggatgatgtttttgactgcgcggatcataatgtcaccgccgatgatcaaataagcagcgaggaaaaggaaaagttcaatggttcccgaatgaaccaaatatgccgctgcgccgagaatgacagccgccgccattctgatcagcatattgaccattctattacgatagccatcatcagctgatttctttttatgcttttggcgaaccgttacatgcggatcaattgatttcacttttttctctactttattcgtgacccattgctcttctttcccatcggctgagacagttaaggtgcttgccgcaaaatttaccgcgcatccgtcaatgccttttatgcctttgactccattttcgattttttgggcacaattgctgcaatccaaaccgtccagaacgtattcctgtttcactagtctcaccttaccttccgatttagggttcccacttcaaagcgtatcaatgagtattgcattctttataatatatatgagcatatactcatataatagttacacctattatatgttgttttccaagaaagtgtcaatgaaaaacaaaaaccggcatatagccggtttttcattttactttttgcagacgaagagcattcagaacaacggaaacggagctgaatgccattgctgctcctgctatccacggtgctaaaaatccaagtgctgcgattgggatgccgaggctgttatagccaagcgcccagaataagttttgtttaatgtttttcattgtcaatctgctcatgcggattgcgtcggcaatgctgttcagatcgccgcgaataagtgtaatgtctgctgtttccatggcaatgtccgttccagttccaatcgccatgccgatgtcagctgtggcaagcgccggcgcatcgttaattccgtcgcctaccattgccgtctggcggccttctttttgtaggcgggcgatttctgctgccttttgttcaggaaggacttccgcaatgatattcgtaattcccgcttccttcgcaatggcttctgcagttctgcgattgtctcctgtcatcatgatgacatcaaggcccaattctttcagacgggcaacagccttccgcgacgtgtccttaatcgtatctgcaaccgctactagcccagctgcttctccatcaatggatacaagcataactgtttttccttctgcctctagctcttccattttggcgagaagagccccatgctcaacctgtttgctctccattaattttcttgtgccgacgaggatgctttttcctccagcttcagccaaaatgcctgcgccgacttttgcttcaaagcgggtaagcttcggtatctcaagccctttatctttcacgccagcaataatcgcttcgccaagcggatgctctgatcccgtttccgctgccgctgcaaattgaagcaaatctttttcttcaaaatggccgaatggaatggcatctgtcagacgcggcttcccgtttgtcacggttccggttttatcaagaacaattgtatcgagacgatgtgttttttctaaatgctcgccgcctttaaataaaatcccgaattcagcagcgcgtccagatccagccattatgctcgtcggagtggcaagaccgagggcgcaaggacaggcaatgacaagaaccgcaatgaacttgctgatcgcttcggcaaaatcgccaggagccgcccaaagataccaaatgagaaaagtgagaacggcaatccccaatacaatgggaacaaaaatacctgaaatctggtcagcgagacgctggatcggcgcttttgacccttgtgcttcctcaacaattttgatgatatgagaaagcgcagtatcctttccgacgttgacagctttaattttcagaaagccgtttgcgttaacggttgaacctgtcacgctgtcaccaggatttttgtcaacaggaagactttctcctgtaatcatcgattcgtcaaccgctgagcggccttcaaccacttctccgtcgacaggaattcgttcgccaggtttgacgtaaacaatgtcattaacaagcacttcgtcgatcgggatgatttgctcctgtccgtctcttacaacagtagctgttttcgcttgaagcttcatcagctttttaatcgcatccgaggaacggccttttgcttttgtttcaaacaacttgcctaataaaatcagcgtcagcaaaatcgcgcttgtttcatagtaaaggccgtctgtatgcccgtgagagccaaggctttgaaaagtaagataaagactataagcgtaagcagccgtcgtaccgagggcgaccaatacatccatattggcgcttttatttctgagcgccttatatgcacccacataaaacggccagccgatcagaaattggactggtgtcgccagcgcaaattgcatccacggattgagaaatatatccggtacccaaatgaatgatgtaaatgtaaaatggctcaccatcgcccaaagcaatggaaatgacaggacagctgaaaaaatcagtctcgccgtttgcttcctttcttctttctttttagcagcagcagcctcactgtcctgttcacccttcaactttagcttatatccaagcttatttaccgcttctttcaaatcgctgacagacgcttctttcggattgtattcgaccgtaactgtttctaaagcgaagtttactggagcatttgcgacgccttctattttgttaagccgtttttcaatccgattggagcaagccgcacaggtcatgccttcaatatcgaattcagctttttctgtaacgacgtgatagcccagcttttctattttttcttgaatcgctgcagtccctgtttcagcaggatcgtagattacatttgatgtttccgtcgccagattaacatttgcatccgtgacaccgggcatccgcttcagtcctttttcaattctggcagcacatgccgcacaggtcataccagagacctgcatcgcgatttccttttgttcactcaacatactcactcctttatatacacctggggggtatataaaaatgaaagaaatatcgcgcctccctataggcgcgataccttgaatcactcagctacgtcatagccctgatcttctatcgcatccgcaatatctttgactgatactttgtcagcatcaaacgaaacatcgactttacccgcttccagattgacatgaacggcactgacgccgtccagttctcctacgcttgtttctactgctttgacgcagtgctgacaagacattccttcaacttgcaatgttttttgttccataatcaattcctcctgtttattctttctattttcatcctaccatacccctgtagggtattacaataaaaaaacgctttatgattttgtgaactttttaaatacgtccaaaagctcagaaatggcctgttccccgtctccgcttttgatggcatctgctacacaatgatgggcatgatcctcaagcaaatgaagcgccacatttttcattgccgcctgaacagctgaaatttgcacaagaatatctacacaatatctgtcgttttccaccatgttttgaatgcctctgacctggccctcaatccgcttaagccggtttgtaatctgatccttttctttcgagcttttatggtttaatgttttatgttcgttatgcttttccatgcgtacacctctgtttaatgatattaattcccattatactgattgtccaaacggttgtctaagcatgccgatccaaaaaatgaatcagttaggttttaccatttgatcaggagggtatatacttctgttgataacgcttttaaaggggagaagaaaagtggacacgatcaaggttggaatattaggatacggattgtccggttctgtttttcacgggccgctgctggatgttctggatgaatatcaaatcagcaaaatcatgacatctcggacagaagaagtgaaacgggactttccagatgctgaggttgtacatgagcttgaggaaatcacaaatgaccctgccattgagcttgtcattgtcaccaccccgagcggccttcattacgagcatgctatggcatgcatacaggccggaaaacatgttgtgatggaaaaaccaatgacagcaacggccgaagagggggaaacattaaaaagggctgccgatgaaaaaggcgtattattaagcgtatatcataaccgacgctgggataacgactttttaacgattaaaaagctgatctctgagggatctcttgaagatatcaatacatatcaagtttcctatgaccgctacagacctgaagttcaagcgcggtggcgggaaaaagaaggcactgccactggtacgctgtatgatctcggctcccacatcatagaccaaaccctgcatttgtttgggatgcctaaagccgtgactgcaaacgtgatggcccagcgggaaaatgctgaaacggttgactattttcatttaaccctggactatggcaagcttcaagccattctatacggaggatcaatcgttccggcaaacggacctcgttatcaaatccatggaaaagattccagctttatcaaatatggaattgacggacaggaagacgcactcagagcgggaagaaaaccagaggatgacagctggggtgcggatgatccggagttttacggacagcttacaaccattcgtggctccgacaaaaaaacagaaacgatcccatcagtaaatggctcctaccttacttattaccgcaaaatagcggaaagcatacgggaaggtgctgcgctgccagtcactgctgaggaaggtattaatgtcatccgcatcattgaagccgcgatgaaaagcagtaaagagaaacgaaccattatgctggagcaataaaacaaaagcctccccaagtaaggggaggctttttcattagaatgtttttcctgcttctttcgcacgcgcaatcgcgtcttctttgatttgctgtgctttatcaggctccgcattatgtccctctacgaaaatgccatcgaaggatggtacgccgaaaaaattcatcatgatgccgatgtagcggtgtcccatttccatctcagccgcagggccttctgaatagtagccgccgcgcgcttggatatgaattgcttttttatcagttaacaagccgacaggaccttgttctgtgtatttgaatgattttcctgcaacagcaacagaatcgagatacgctttcatcactggcgggaatgagaagttccataaaggagtaacaaatacgtacttatcagctgatgcaaattgatcgctaagctctcccaaacggcctactttcgctttttcgctttcagaaagctcttcaaagcctgtacctgactgaagctttccccatccgctaaatacatctgcgtcaatgtgcgggatgttttctttgtacaaatcgatatgtacaacttcatcatttggattcgcttctttgtaagattcgataaatgctttacctgttgccatactgtacgaagttgcttcgtcatgcggatgagcagtgatatataatacttttgccatttttaccagccctttcgtttttaaaaatcacacatcaattattatcatacagatgcataatgattattctgtctctcttagactttattataaagacaaagaaatttactttcaagtaaaatatctcgaattaaagattatttaactttcccaaacagcttacttttcaaaagctgttctcaagccggaatacagcgcggacagttctttactgattcgaggataatgagggacatgcggcacttgaatatccgcaggcatccttttcactataaaggattgctcagccttttcaaaaaacgcccccagctggttgatctcttcatcagaaaacggagcaggcggacggcggtgagcttgggccgaaagcaaatagtaccctaagtgctgagcaccggaaatggcaggccagagcgcatccgcattcgcgtgaggaaactcgccaagcgccttgtcatacgcatcccgaagcctgacaagactcacccttaacttgtgttcgtcggcaatttgcccggttaacagtttctccataaactgcccttccagccggatgacattccgcacaagttctggcagccgcttggttgaaaaccgccgccacaaaagcattgttcccaacagcccgatcacgctgccgacagctacatcagtcagcctcgctatcataaaataaccggcacccgcgccgccatgcatactttctgtgataacaagcgcatttgcggttaaaaagggaacagccagcgcataattgcggacgatcagcatctcaagaagacattgcagcgctgcaatacaaaacgcaatataaacaccgcccagcttaaaaaacaggattgcacctgccagcataacaccgatcaccgttccggccgaacgctgaatagccctgtgaagcgtaaaaacaacagtagtgccaagcatgaccgctgctgccgaaagcggaatccaataggagcgtgcaaagccgaatgcgagggcaaacatatcggcggcaaacagaacaattccgtactttaacgctctaatcaaaactggagacttccagtcaaaagcatttctcaaaaagtaaaaagaggatggcaggcggcttggttccccgtcaagctgcttatcaaaacgtcctgaagcgatatgcaaaacctcattgatttcttcaaacagcttccgcctaggctcagattcgttctcattaatctgaaacgtaccgaaaacccgtgcatgcgcaagcatatctccggtttggcgaagtgccttttcaatctgcgcggtctctctgtccggcgtttcagctgaaaaatgaataatggcaatgaatatgtcgtcagctttttcaagcaggcggaaaaaccgttcatcatgccgcgattttttccgtttattccctttcccaagaaccgtttgtcgggctgttctaagcatgagcaccgtctgatgctgtgcgttatgaaaacctggcgttccgacggctgaaagacatgcagccagctgatgatatgttttttgcagcaccgctccctccggtccatgtttgttccataaccagccgattaaagcgatacccatggcgaaaatgccgccgagaaacgtcagtcccgctctgaacagcgcttgtgaaggatcggccggcagcccggaactgactaaaaaggcaaggacaaaaaacatcggcgcagggccttgaatgccgagcgcgctaaaaataaacatcgccgctgcaccgatcagccccaaaacagccgccatcatccaaagcatcccggacaaaagtgtccctaaaccaaatgagagggcgatcccaatagaaaccaagagcagcttcaaggcgcgctttttgtacgattcaccgcccgcatataaataaacaaagcctccgatacttgcaattaatccgtaatccgtgtgacctgccaatgcaccgaccagcacaggaaaccctgaagcgaaacctgatccgatagcctttttccaaggaaatggatttgcatgaatgcgaaaggcatccttcacgataggcatgattctttgattgttcgcagcagttttgttcatttgacaaaatccttttcaatgaatgtgtagaacttttcccgtttcttcgctttagtatgcccaaaaacgcggttagcttctcaattggtgcgcccgataaaaaaacagagacttataccgtctctgcttcattacatcagtttattataaaagcggcacctgtcaggactgttttgtccttctgccttccttcaagagcaggtgaataaaaaataaaggataaatcaatagatacccattaaacagccaccacacaagatcaaagtcactgctgaatgtccagaatgatagcgcctgcagacctgaacaacaggtcagcacaagagaaatcagcgccatcagcttccagtcagctcgattcacccgctgtaggtacaagctgtacaaccctgtgacagaaatcaggatatccagcggaaaaaaagaccagttccaagcgatcataaacggatggtcatgatgtttaaaagcccagctttccggtatgagagaaaacccggctgacagccagtacaagataaaaccgatatcagtcacgagaaaaaacagcttcatatatctcatttgtactgcccgcttttatgtaccggctcagacaccgcagcatgctcgatcaggtttaaagacacaacaccggcaataatcaaaccaattgaaatgactttcatgacactaacatgttcttgaaaaaacaaaaaaccaatgactgtaatcaggacgattcccatccctgaccatacagcataagcaacagatacatctattgattttagcgtaagcgtcagaaagaaaagactccctccataaaagaaaatcaacagcaaactgggaataagctttgtaaaaccagacgatagcttcatgctgaccgttcccgcaacttcaaacaaaatcgccaagcatagaaacacccaattcatgtcgcatcagcctcctcatcagctgttataccgttaaacaaaacatctacaattgattcaagcacctctcctgtcatgaactgatgtttcagcggatattcagggtcatacacttgattgatgctccctatatacatgtgaacaaacaggtccggattgatgtttctaattctcttttgctgtttgcactcgtctaataattctaggacaatggcccattctgccttaataaacgtgtctaatgtaagccacgcatcgtaatggtatttctttagttcatttaataatcccatgttcagcagttccatcccctgcggaaggctgatcagcatttttttcaccttttcaagcacatttaaactttcattttcatagatgtctctttctatttgcttcatttcagctataaattgttcgacaaccgcctcaacaagctgatctttagatgaataatatgcatagagagtccgcttgctcgttcccagcgctgccgccaaatcattcatcgtaaatgaaaatcctttctgcttgatcagccggaaggtttccgccagaattcttttatccatattaatcccccgctttcggtaccaagaaaactatttcggtaccaatattatacggcagaaatttatggaaagcaacaatatataaaaaaacctctcctattgggagaggtttaaaagacactgcggaccaaaccgccgtccgcccgaagtgccgcgccattgatcgcagaggaaagcggactgcttaaaaatgtaacaaagtgggcgatttcttccggacggatcagtctttgaataatagatgtcggccggttttctttcataaaacgtgcctcagcttcttgaacagtcaggttttcaccaggatacagcgagttcagcatggtttccacaccctctgttaaggtagagcccggcatgacggtgttgactgtgacattcgtgccggttgccagctccgccaaactgcgggaaatggacagctgcatcgtttttgtcgcactgtaatgcgccatttcctgtgacggcataatcgccgcttcactggcaatgaaaatcacacgcccttcctttttctctatcatgttatgcaaatacctgcgtgtcagccttacaccgctcataatattcacttcaaaaaaacgaaaccattcatcgtcgggaatatcaaaatactccgccggttcaaaaatccctaaattgttgaccaaaatatcaacctctggatatgcctgaaacagctcattgcagccttcttctgttcccaaatcaaatgcagccggataaagaaccgcttcagcatgttgtgttttcagttcatctatcgtctgattcactttctcttcccggcgtccgttaatgatcactgccgcaccttcttcagctaacgaagaggcaatagcttttccgatcccagatgtcgaaccggtcaccagtgcggtttttccttgtaaattcagcttcattattcatccctccgtttttgattcctcttatttattgacagaaatctgattggtgaaacatctgctctgcaatcagtatgaaacagctgggattgaaatggaagtacgcactttttggtgcctgtggtttggagaaaaaataaagcagaaccctctaagaggttctgctttattgtcagtatgtatggagacggtgggagtcgaacccacgtccagaaacatcgattacttaagcgtctacgagcgtagcctgcatatttatggtttcactcatcttcttgcctgcgggcgggccttccgagagctagtctgttcatctcttcttacgttctcagacaggaacgcaagcgtagcctacttggatgtgctcttcacagacacataggcaatgtcaggaagagctcgctgcgcttattaggcagctaatgctacgttttggttaaaactgttagttttgccagttatatttaagtgcgtttttacgagatcgcctctcggctcgcagctcaagctcgatccatccctgtcgaatccgtaacgtccccttggtataagggaaatacgggagaaaatatcaagctctcactcaaactggctatagtcttattataacatgatcacggctcttttcaattgtcaaatccttcaaatgaatggcgtcgtgatctgatcgtgaacacagtatagcacaggcctgattttcgaatcaagcactatgcctttagaagcctttttgactgtctctgaacgctctttcgatttcccgcttcgcgtccttgcgcttcaggtcttcccgtttgtcatagttcttcttcccttttccaaggccgagaagcactttcgcaaagccgttttttaaatacagcttcagcggaacgagagaatagcctttttcctttgttaacccgatcagcttattaatctccttgcggtgcattaacagctttcttgtccggagcggatcgtggttatagcggtttccctgctcatatgggctgacgtgcatattgtggagaaacacttctccccgttcgattttggcgaaggaatctttaaggtttacgcggccggcgcgaatcgatttgatttcggttccttgcagaacgatgcctgtttcataggtttcttctataaaataatcgtggttggctttcttattttgagataatacttttcctgacccttttggcatgccagaacctcctctctctaaggaaaaactgtccaccttttgcgatacgctctattttaccaaatgtcacgtaccgctacaatgaaaagctgtttccgaaagaaagcaaatagagcgctgcggccctatttgctggttgagctgctatttcttctttttccgtttctgtttcggagcattctggaagccgcgttttttctttttcttcttcggcttagtgaaccactcccctttttcctcagacggagctggagaaacaggtgtattggtgctttgaacacgttttctggcaggctttccgcgttttctgctccggctgctgtccaattctctcggacgccgcggagtgcccttcatgccgacaatttcaaagtcgatattgcgctcatctttattgacatcgacaaccttgactgtgatttcatccccgatgcggaagacgttgcctgtccgctcgccaatcattgcgaaatgctgttcgtcaaagcggtagtagtcatctgtcataaagctgacatggacgagtccttcaattgtattcggcagctcgacgaacattccgaagtttgtcacagagctgatcatgccgtcaaactcttcaccgattttatcaagcatgtattccgcttttttcaggtcatccgtctcacgctcggcgtcaactgcacggcgctccatagatgatgtatgttcggcgatatccggcaggcgttcagcccacttttcctgtgtcgcttcatcgactttgccgttgatcaaatacgttcggatcagacggtgaacgattaagtccgggtaacggcggatcggcgatgtgaaatgcgtatagaattccgttgacagaccgaagtgccccaagctttgcgggtcgtatttcgcctgtttcatcgaacggagcataacagtagatataaccgtttcctctggtctgtcacgtacagcgtccagaatgctttgcagcgcgcgcggatgaatattccccgccgttcctttcaccacatagccaaatgtcgtcacaaattctaaaaacttttgcagcttttcagcattcggctcttcgtgaatccggtatataaacgggacgttcatccaatggaaatgctccgccactgtttcgtttgccacaagcataaattcttcaatcagcttctcggcgacagagcgttctctgatcacaacgtctttaaccgctccttcgtcatcaacaagcacctttgcttctttgaaatcaaagtcaacggcgccgcggtccatccgcttatcgcgaagaatttgagccaggcgctccatgtctttgaacatcggaacaagaggctcgtatttttgcttcagctcttcatcatcatcaacaagaattttattcacatctgaatatgtcattctttccgttgttttgatgacactttggaagatctcgtgctctgtcacctgtccctgactgttaattgtcatttcacaagaaagcgtcaggcggtcaacctttggatttaaggagcagatgccgtttgacaatctgtgcggaatcatcgggatgacacggtcaaccagatacacacttgtccctctttcaagcgcttctttgtcaatcggcgagttttcggttacgtaatggctgacatcagctatgtgaacgccaagcttgtagcttccatcatcaagtttcgtcacggtaactgcatcatccaaatccttcgcatccgcaccatcaatggtgacaatcacctggtcacggagatcacggcggtctttcagatctttttcatcaatcgtgtcaggcgtacttgatgcctgttccatcgcgtcagctggaaattctcccggcaggccgtgcttatgaatgaccgataaaatatcaatgcctgggtcgtttttgtggccgagaatggtttcaacctcaccctctgcgttcatgcggccttcaggatagctcgtcagcttgacaacaaccttatgcccttccgcagctccatttttcccatttttcggaatgaagatgtcactcgtgatttttttgtcgtccggaatgacaaagccgaagtttctcgtttctgtatacgtgccgacaacccgctgaatcgctctttctaaaatccgtatgacggttccttcctgcctggagccgcttgactgtgaatttagacgcaccatgacgatatcgccgttcattgccgtatttagctcattaggcggaataaacacatcacttaacgacgtatcctcaggcagcaaaaaggcgaatcctttcgcatgggctgaaatctttccttttattaagttcatcttctccggaatgccgtagcggtcgcttctcgtccgtacgataagccctttttcttccaaggcgactaacgctttgacgagctctttaaactcctcggcttccgtaatatttaacatctcctcaagttcctgaacggtcagaggtttgtacgcctcttccttcataaacgagagaagcttttccataaatgcttctttttccattatccgacctcctgttgattaccaatcgagcttctctaaaaattcatacacatcctgatggacgaggtcacgttctttgtcgagtgtaatgacatgccctgattcctcgtaccatttcagctgtttatcatcagtttccacttcgttgtaaataatattggcgctttcggtattaatcatgtggtcatgacgggcctgcaccacaaatgtcggtgaataaatcatatcgacattattccgcacatcagcaattaagtcttgtagcgccttgagggtattcatcggcgttttttcgaattctttcatttcctcttcaatttgctccgggcttttcccctcaaactttttgtaattgcgagcgtatgaaagaacgccttgatacatgacctcttcactcttaatatgcatcggtgcgcacattgggacaattccctttatgggtacagtgtaacccaatttcagcgaaaaaaccccgccaagcgacagtccgcaggcagcaatgctctcatagccttcagattttaagtattcatagccatccattacgtttttccaccagtcttcgggccccgtatgtacaagttcttcaggcgggacgccatgtccttcatattgaggcgcgtggcacgtatagccgcgttcattcaaatatcgtcccagcatccttacatccgctgtattgcctgtaaagccgtgcagcaaaagcaccgctttgtctccgcctttaaatgtaaatggttttggtgtcacaactttcatgctcatgtctccctttctatctgcacgatcattttagttttccacagtttaatcagaaaaaaacgttttgaatatcatccagaaacgtgaaaaaggcctgacttcacatcagaccttatacaaacattgccctataggatataagcaagcgcaatcgttaacacgaaaaacaagactgccagcactaccgtaatgcggtgcaaaattaaatcaagacctcttgctttttgtttcccgaagagctgctccgctccgcctgaaatcgcaccagataatccggcgcttttactggattgaagcaaaacgacaataataagtgcaatgctgacgataaccaataaggtaatcaaaactgcgtgcatcccatacacctccagactcactggctacattacttctattttacatgaaaagggttggcatgtcacgctgtatcagacgccaaaaggccggataagacgttttatcttggttaccctattcatatgaaaaggacaaaggagaaaagcgatgccgcttatcagcatagacagcaggaaacatcttttttatgaagaatatggacagggaatccctatcatttttatccacccgccgggcatgggacgcaaggttttttattatcagcgccttctatccaagcatttcagggtgatttttcccgatttaagcggccacggtgatagtgatcatatcgatcagccagcgtctatttcctattacgcaaacgagatcgcgcaattcatggacgctttggatattgataaagctgtgttattcgggtattctgccggaggcttaatcgcgcagcataccggcttcacccgccccgacaaagtgtcacaccttattctgtccggcgcctaccccgctgttcataacgtaatcggccagaagctgcacaaactgggaatgtatctgcttgaaaaaaaccccggtttgctcatgaaaatcctcgctggcagccacacaaaagacagacagcttcgcagcatattaacagaccatatgaaaaaagcagacctggcccattggcatcagtattatctggattcgcttggctacagctgcattgaacagctgccccgcctagaaatgccaatgctgtttatgtatggcggcctgcgggactggacctttacaaacgcaggctattaccgaagatcgtgcagacatgccgaatttttcagattggaatatcagggacatcaattgccgacaaaacaatggaaaacgtgcaatgagctggtgacacggtttgtgctgacacatcattcaatatagaaaacgttggatctccttgcgttttctatattttattgacttttgtcaacaaaatcatagtaaaaaagatcctcaaatttcaaattaaaatagtgaagcattttaccgatcacaagctgccccggccgtctttctccattcagcacgcggctcagtgtggcgggtgagactccgatttccagcgcaagctgattaagggaataatcgttattaaccatatactgcaagacataatcacgtctaatctgtatcttttctactggcactttcctcaccttccattcctgaaaaacttttttctatacttttacattacggcttatgttaacttttgtcaatacatttccagtctacctattccctttagtcaataaacatactaaaatatgagtaacagtgagggacggggtgagatatatggaaagctttggcgaacaattacgggcattgcgtgaagagagaaagttaacagtcaaccagctggcgacttattcaggcgtaagcgcggccggcatctccagaatcgaaaacggaaaacggggcgttcccaaacctgccaccatcaaaaaactggcagaggccttaaaaattccttatgaggggcttatgtacaaggctggttacatcgaagaagtgcatgaagccagggccccttacgaaacgaagtgcaagctgcttgaaaaagcggaggcctatgacctgaaaaaccttgcgcttcttgagaacgaaaagtggcaatatctcaataaagaagatttgctcatgctggatcattatttttcgtttatttcagacgaagccaaaaaacggtctgctgatgactgactcttgatagaaatgtgaggcgatagaccatgtcaccgttcggacagcaattacgggagctgcgccgcgcccgcaaactgacagtgaatcagcttgcggtgtactcaggcatcagctcggccaccatttcaaaaattgaaaacggcaaacgcgggacgccaaaacccgccacgattaaaaaactggcagccgtcctgaaagtgccgtacgaaaacctaatggccgccgcaggccatattcaggcctttcctgaagaaatccgcgaagcatctgaaagctatcaatccgtttatgaaatttaccagacggctgtcactcgcggagcggagcacctcccgattttcaatagtcaaaaatgggaacatctctcaaagcaggatattgaaaatctcagcaaatacttcgattttttgtcttcagaagcaaaaaaacgcgcctcttcctcataatcccctgtttctctttctatattttatcaatcacgcttgcataccctccctcgttatttgcgttataatagtgacagacgaggtgaaaagtatgaaccaatcagaaatgtgtcctagatttgaaaaagcagtcgacatcttaagtaaacgctgggtcgctttaatcgtatttcagctcttgaacgggtctcagcgatttagcgaaattgaagcagcacttccaaatctaagcggcagagttctgtcagaacggctgaaagaacttgagcttgaaggagtagtgaagcgggatgtcatccctgaaactccggttcgcatcgaatattcattgactgataaaggaaaggcactagcacccattttaggtgagatttctaaatgggcgactgaatggattgacccttcctttcttgactaattgctaaaacggctctgatctcaaagatgagaaaagagccgttttttattttttcccaggtgaaaaaacgatttctcagccgatatatagtacatccacacattacgtttttaaaggagaccactatatgcgactgacgatttcccgcaaattcagcctggtatttttgacactgatcctgatcaatttacttgtaggcggaataggcgttcttaatatgcagcatatcattcaaaaaacagatgaaatcaacacaaaatggattgacggcatcaaaggaatcacttcaattaattatgtaaccgagcacctgtcttctaaagaaaaggactttctgatttatacagacaaaagcaaaatggatacacttgatcaagaaatgaatcaaatcatggaagacattaaccaaaagctcgataactacgaaaaaacgatctccactgataaagagcagaaactgttcgagcagcttcaaactgaagtgaatacctatatggatattcatgcgcaaattatcgaaagcggccgcacgaatgacatggacaaagcaagaggtttattggttcagactgaggccagctttgaggatatgaaaaaaacaatcactcagcttgttgacttaaatcaagaaggcagcaacacagcggtaaaagaaacgaaggccgtctatcataaagggctcatttacactgctttgcttgtggcagcttcgatcctcatcagcattttcatctggctttatatcacgcgaaacattgtaaagcctatcattcgcatgaaggaatctgccaatcatattgccgaaggcgatctgtcgaacgatatggagccgctcaactcaaaagacgagctgggtgatctgaatgaagcgctgcaaaaaatggtagggaatctgagagatattgtcggatattctaaagacatatcaagccgggttctttcttcttcacaggtgcttgcaaccgcaacgaatgaaacaagatccggcagcaaacatattaccgagacgatgaacgaaatggctgagggctctgaacagcaggcccaagacgccgtgacgattgccgaatcgatgaatgagttcactgaaagcattgataaagcctataatcacggcatcaccatcagcgatacgtctcaaaacgttctcgaactcgcggtaagcggaaacgaaaatatggctacgtcattacagcaaatgaaaaccatccatcatattgttgaagaagccgtgcataaagtgagatcactggaacagcattctcaggatatcaacaagctcgttcaagtcatcaacggaattgccgagcaaacgaatttgctgtcccttaacgccgcaattgaagctgcccgcgcaggagaaagcggcaaaggcttcgccgttgtggctgatgaagtcagaaagctggctgacggcgtttctgattccgtgcaggacattacccggattgtaaacgggacacagcaggagatccacactgtcattacgtacttggaaagcagctttacagaagtcgaaaaaggaacggaaaacctgacagacaccggacaggctatgcagcatatcaaacaatccgtcacccatgttgcagacagcattaaggaagtaacggatggcctgaagcagttaacaaaccaatcgattaccatcaatcaatcgattgaaaatatcgcttctgtatccgaagagtctgccgccggcattgaagaaacattttcaattaccgagcaatccgcccattcgatggatcaagtgcttctaaatgctgaagagcttgagcagctggccaatgagcttaatgagaagatgggtcagtttacgatttaaatagaaaaaagaggctggactccagcctctttttctattctatgcagctgattgaacatgtttcgccccggttctttttttcttcaccggacttaatgcccgctccagccaagccatgagcaaatccgcccctaccgccatcaccgcagttggtatcgctccggctagaataatcgcagttccgtttgttgcgtttgagccgcggacaatcatgtccccaaggcctccggcaccgacaaatgtgccgatcgctgtaattccgatggcaatgacgagagccgtgcgaaggcccgccataatgacagaaagtgcgagcgggagctcaaccattctgagtacttggaatttcgtcatgcccattgcttttcccgattctaagtaggcatgttcaatactgataatgcctgtgtacgtgtttcgaataatcggcagcagggaatacagaaataatgatagaatcacggtatttgcgccgagccccataacaagcattaagacggccagcatagcgagcgccgggattgtttgaataacgtttgttacggcaaacacccaggctgacaaacggcgaaaatgcgcgatgaggattccggccggaaccccgacgacagcggcaaataaaacgccgtaagccgacatgagaaagtggcggccgaattcatccatgacgtaactgccattctgcgcgtaatacgtcattaactgttcaagcacgttcattgacctcttccccctttcacgattcgaagtagtgatgtttttctaaatattccttggcaacgacagacggttctttgagattgccgtcgacttcatagttaagctcctgcatcgtggttgtgtcgatttttccgagcattttcttgatgatgccttcaagctcaggatgttctttgagcaccttttccggaacaaccggagagcagtcgtacggcgggaaaaattgtttatcatcctttagcattttgagaccataggacttgattcttccatcggttgaatacgcaagcacaatgtccatttttccgcttttcaccgcgtcgtacacaaggccgatctgcatcggatacgtgccgccgaatgtcatgccgtaggttttcgtaaaatcctgatagccgtttcctttgagcttcatccaatagttatcaacgcccagctttaattgcggcgcccattttttaacgtctgatacggtctctaaatggtattggtcggccagttccttgctgactgtaaaggcatatgtattatcaaacccgtaggagttataccattttaaattgtatctttttttaaactcccgctgagtaagcgccagcgctttgtccggatctttttcaggttccattctcaacgtgcctgtcagcgcgtctcccgtatatcttgtggccgcaatgtcaatttccccgttcattaaagcctgctgctgcaccgcgttggagccaagatttttaatcgttgttgttttgagatcagtatggtgttcgatcaactggccaagcatactagcgatgatttctgattcgctcatgctttgcgcgccgattttaatggtctggtctgcagcagcgctgagaccaggaagcgaacagccgctcagcgtcagcgttgccgcaagtgctaaacctatgattaatttgaggtattttcttttcatgagccccctccttatgacaattcattcaatctctgcatgccggcaggtgtcagttttcgttcagcaactgcaagcacataatcaatcacaattgccaatatcgtgacaggtaccgcgcccccgatgatatattccggctgatataaattcagtccgataaaaatgtaatcacccaatccgccgcctccgataaaggaagcaagcgtggcccagccgattaagtaaatcgtcgatgtcctgattcccgccatgatcactggcgcggcaagcggcagctccaccaagcggacttgttcagccggcgtcattccgattcctttaccagactcgagcagatttttgttgacgccgcgaatgccggtatacgtgttgcgaagaatcggcaatacggaatagaaaaacaaagccacaatggccggaaccttccctacaccaaggagcgggataaaaaaagcgaggatggccagactcggcagcgtctgaataatattgacaatgccgataatggtgccggctccttttttcattctggtaagcacaaccccgagggggacggcaaccagcacgcctaagatcacagcaatgagcgatatcgtaatatgctcgtatgttttataaagaagctcgcccccattggtttgcaaaaattgaacaatatgatgcatgacttatcgcccctccctatgacaatgctgcgagctgcttttcttctccccagagggagtcatacacgatgtcgaccagacttgccctcgtcacaattccgatcaggcgtcggtcttcatccacaacgggaacatatttgacaccccgttttaaaattttgcggaccgtgtcgcgcagcagtgtgccgcccagtactgtgtatatatcttcatgtaaaacttcactgacgagattggcctttttccggcattgatcaatgatttcaacatcgacatagccttgcagaccgcgctcgtcatcgacgaccagcaatgaatcgacccgttcctgcctcatcagctgaatggcctcagaaagcgttttatccgcggtgatcgttacaggctgtgtgttcataatctggtcaacccgttcaacatccgggctggatgactgaatcagccgctccttgccgataaattcctcaacaaattcgtctgccggatttcttaaaatgtcatcgggcgttccaacttgaacgatttctcccgcttttaaaatcacaatccggtctgccagcttaatcgcttcatccatatcgtgggtaacaaatacgatggttttatgtaaggttttttgcagttttttaaattcttcctggagggaatccctcgtaatcgggtcgagtgccccaaacggttcatccattaagataagcggcggctccgcggcaagtgcccgtaatacaccaattcgctgctgctgccccccgcttaattcatgagggtaacggtctacatattcaggccccatatcgaccaattttaaaagctcacgcgcccgctctttccgctgctgctccggccatttcagcagttttgggacgagtgagatattctgctgaatggtcatatggggaaacaggccgatctgctgaatcacatagccaattttgcgcctgagctctacaggatcctggtccatgatgttttcgccgtcaatgaaaatcttcccggcggaaggctcaattaatcggttaatcattttcattgttgttgtttttccgcagccgctcggcccgataaagcagataaattcgccttttgcaatcttaagatttacgttgttcacggcttttttgccgcccttgtatgttttcgagacattttctaatgtcagcaaacatcgcacctccaaaattaagtttattcaatttgttcagtttaaatttaatttttcagacaattgaatgcttcccattatagaataaagtttataaaataaaaagtttacaatttgttcatattatttataaagtatgtgtaaacgctgatttacccgcattgacgtgtgttgatctccttattgctccaatttcctgccaaattctcttttgacagcattttcgccgtatcaaaaatgtggtatattgacatcggaattgttagctgaaaggatgaaaccgttggagaaagatccgttaacgatcattgaacaagccgaggaccattttatagaaaaaatcgcggaaaacatgcatgcatttggaatgccctctaccgtcggacgagtgctgggcattatttatatgaatcgaaaaccgatgacgcttacggaattatctgaggccaccggcatgagcaaaacacgcatgagccaggtagtgcgggaaatgcttgatgccaacattgccgagaaggtgttcgaaaaaggcgtgcgaaaagatttatatgaggttgagcaggactactatcaaacatttatcacgctgttttcagccacctggagcaaagtcgtcagcaaaaacaaaatgatgcataaaaaactcaatcgggagctgcttagcgtgttggatgaagagcttactcctgaagcggaagaaaaagtgaatgagctgctgaaggaattaaaggaatggctcgattattataattggctcagccgtttgattgagttttttgagagcgaagaaatttttaaatatgtgccgaagccgtaaaaaacgccctgtcattacaaggcgttttttcttatgcggcacctgccaggtttttcttttttctctttttaatcgggcttaatgctcgttcaagccagcccatgaccaaatcggcaatcaccgccatcagagctgtggggatcgctcccgctaatataatcgcggttccgtttgtggcgtttgatcccctgacgatgatgtccccgagaccgcctgcaccgacaaatgtcccgatggccgtaatgccgatggcaatgacaagcgcggtgcgcaggccggccattatgaccgaaagcgcaagcggaagctcgaccatccgcagcacttgaaattttgtcatccccattgcttttccggattcaagataggcgtgctcaatactgataatccctgtatacgtatttctgataatcggcagaagagaatacagaaataatgacaatatcactgtattagcgcccagccccatgacaagcatcagcacggcaagcatggcgagagccgggatcgtctgaatgacgttcgtgaccgcaaaaacccatccgcttaatcttctgtatctggctatcaggatgccgagcggaattccaacaatggcggcaaataaaacgccgtataccgacatcagaaaatggcggtaaaactcctgcagcacataaccgccgttttgcgaatagtatgtgccaagctgctgtagtacttccatatgatccacctcttttcttagtcaaaataatgatgtttctctaaaaattcctttgctacgacagacggctccttcagcttgccatccacttcataattaagttcctgcatcgtttccgtgtcgatttgcccaatcagcttattgatcacaccttcaagctccggatgcgccttaagcaccttttccggaatcaccggtgaacagtcatacggcgggaagaaacgcttatcatcttttaagattttcaagtcataggctttaatccgtccatccgttgaataagccagaacggcgtccattttcccgtttttgactgcgtcatagacaagcccgatctgcattggataagttgtgccgaattcaaagccatatgtgctgacaaagcctttatacccgtcaccttttcgtttcagccaagcattgtcgacgcctaatttatattgggaggcattttttttcaggtcggacacggtgttaatatgctcattttccgcaaacttttttgttacggtgaaggcatacgtgttatcaaagccgtaggaatcaaaccatttataagaaaagcgcttttgaaactcgttctgcacaatgttcagcgctttttttggatctttctccgcttccttgccgagggtgcttgttaaatctgttccggaatagcgcgtggctgaaatatcaatgtcaccgcccagcatcgcttggtgctgaacatagtttgagccgaggtttttcactaaagcggtattcaaatctgtatcatgttcaataagctgcgcgatcatattcgctaaaatttctgattctgtcatgctttgcgccccgattttgatcgtgtcgtcagaagcgccgccgagacccggcagagagcagccgcctagcagcatgacaaagacgagagcaaacgcgccaagccatttgatttttgtcgttttcaacagagccaactccttacgaaacttccttcatcccttgtaatcctttcggcgtcacctttcgttctgtcacggctaggacataatcaatgataattgccagaattgtgacaggcacggcaccgccaatgatatattcaggctggtataggttcaggccgataaaaatatagtccccgaggccgcctcccccgataaacgacgcaagtgtcgcccagccaattaggtagatcgttgatgtgcggatccccgccatgatgatgggaattgccagcggaatttcaacgagccgaatctgctcccagcctgtcatgccaatccctttccccgattccaggaggtttttatttacacctttaatgccggtatacgtattgcgcaagatcggcagtaccgaatagaaaaataaagcgacaatcgcaggcacttttcctacgccgagaagcggaataaaaaaggctaaaatcgccagactcggcagggtttgcacaatgtttacgaaaccgataaccgcacctgcgccttttttcattctggtaagagcaacgccgagcggcactgcaacgataatgcccaatacaacggctatgagtgaaatatataaatgctctcctgttttatacagcagctctccgccgttcgtttgcaaaaaagtcatcatttgattcatcttaaaagagctcctcccctggtcagatcgtcatgagctggttttcctcgtcgccccaaatggaatcgtacacgatatcaacaaggctcgctcttgtcacaatccctgctaaatggttctgttcatcgacgaccggaacatacttgatcccctgcttcaaaatttttcggactgtatcgcgaagtagcgcccctttttgaacggtatatatatctgagcggtatacatcgccaacgatgctcgcttttttgcggttttgatcaatcatttccacatcaacatagcccttcagcacgttttgccggtccacaacgagcagcgagtcaacacgtttttctctcatcagctgaatcgcctgagaaagcgttttgtccgcagataccgtcaccggcgttctgttcatcatttgctctacccgctcgatatccggtcttgactgaatcaggcgctctttcccgataaattcttcaacaaactcatttgccgggtttcgaagaatctcatcaggtgtgccgacttgaacgatttctcccgcttttaatatcacaatcctgtcggcaagcttaatcgcttcatccatatcgtgggttacaaacacaatcgttttgtttaaggttctctgcagttttttgaattcttcctgaagggaatcacgcgtaatcggatcaagcgctccgaacggttcatccattaaaatgagagggggttccgctgccagggcgcgcagcacgccgattctctgctgctgtccgccgctgagctcatgcggataacggtctaaatactctgggcccatatccacaagctttaacagctcgcgcgcccgttctttccgtttttcctcaggccatttcagcagctttggtacgagtgagatgttctgctggatggtcatatgggggaacaaaccaatctgctgaatcacatagccgatttttctcctcagctcaaccgggtcctgttccataatattttctccgtcgataaagatccttccagacgatggttctatcagtctgttgatcatcttcatcgttgtcgtttttccgcagccgctcgggccgataaaacagataaattcaccttttgcaatatctaaatcaatgctgttcacagcttttttgccgcctttatatacttttgacacttgttccaatttcagcaatccgtgcacctccgcaggtttcctttaaattttctgaaaagtataatccttattatagtttgaactttgtaaaataaaaagtttacaatgtgttgaaattatatgttatttatagattatttattgttatgaccgagacggaaagggtgttcttacaattacgccggatacctcccacttcctctgcattcagctattttcaacaccaggaagaaatatgatatattgacaccatcaattgccatttgaagggatgatcagctgtgaaaaaaaccgctctcgacatcattgaacatgctgaagagcatctcattgagaagattgccgaaaatatgcatacgtttggaatgccttcaactgtcggacgtgtgctcggaattatttatatgaatcgaaaaccaatgaccttaagcgagctctctgaggcaacgggcatgagcaaaacacggatgagccaggttgtccgggaaatgatcgatgccaatatcgccgaaaaggtgtttgaaaaaggcgtacgaaaagacctttatgacgtcgagcaggattattatcaaaccttcatttctttatttgcggcgaattggacaaaggtcgtgagcaaaaacaaagtgctgtataaaaaattaaaccgggagctgagtgatcttttacaaagggacgggcttaccccggaagcggaagagaaagtcaatcagctgctgaatgaattaaaagaatggcttcattactatgattggctgagcaggttgattgaattttttgagagtgaggaagtctttcggtacgtgccaaaaacaaaagaaagcagctctctaaaataagggagctgctttttgcatcatgaggttaagatcggaaacatgcctttcagccccgcaccaatcatcccgaccgcaaccacggctaagattaatcccatcagtctggtaatcacattcatctcggtttttccgagtttgctgctgataaaagcagaatagtggaaaaagagaaaggtcagggcaataacggcggctatgccgatcgtgacagccgcataatgaccaatgccgctatgaccggcggaaaggctcatcactgttgcaatcgttccgggcccagcaatgatcggaatggataaaggtgtgactgatatatccgctttttccttgctttccttatgttcatcatggtgaagagattgcacgtgtgattctttcgcattcaatagattataggcaatgccgaaaatgaatatgccgcccgccactcggagcgcgtaaatgttgatatcaaacagtttaaagataagatgaccgaaaaccaaaaaagctgcgagaataaaaaaggataaaatagctgccttccgggcaatcgcttttctttccgctgcagtatagccttctgtcagcgtcagaaatatcggtacgtttccgatcggattcgatactgcgaataaaaaatgaagacgtgaacgataaatgagaacatcatatacctccttgttgatagtctctgcacaggaaatagaattattctccacccttttacccggaggcgatttcccggtaaacctttatagcctgtcagaaacgcgccatgctacaatgaagtgacaaattgaataggaaggacgtatacagatgttcaaaaaaattgcggcagatgccttgggcttatctgatatcggaaaaattatcgtacctcaggactatgacaaaacagacgcagacgactatgtcatgcatgaagataatgagaaaatttatttcttgattaaaacaaaagcagacgagtattgctttacgaacctggccctgatccatgtagacggcgaacgcgccacttcctcgaaacgaacgttgaaacgctatccttattcgcaatataaaatctctgacgtttttcttgaaactgccggaaaagtggatttggatgttgaaattaagttcaagctgggcggtgaacaattcgacattgatgtccacaaagaccagattgaaaagttaaaagacctttataaagcactgcttcgcatcgctgaaacaacctatgaaaatgacattttaatcaatcaagcggagcaaagcttagataaagcagtgacgattcttcaccatacccgccctgagcacgtcaatattgaaacgcaatacaaagagctgaccgaattcggattcacttggctgacatccgttcgctcgcagtatcatattaaggattttggggatgtatttgagaaatatattaataactagataaaagaagacacagctgctatcgtgctcgtgtctttttttgtatgaatattgattactttacaacttttttcttttataataaaactattagtctattttccctatattacagataaaggagttattttatgtattgtcctcaatgcggccatcaaacagatggcggaaatttttgtgagaaatgcggatcaccgctccccggtcaatcaggccaccagcatgcagctcaaactggagccgctgcaaagcaagcagcaaaacagttcggttcatttgtcttatccgtcctgaaacgcccttatcaggaatgtaaagcaacaggcggagaacagctgatcagcgcaatcattacgatcgttcttttcagtttgctgacccctttgatgttttatattcttttttcagacggtcccgaaagcgtaagctttacagcaatcttcttagagccaaccatttattttattttatttctatttggcctgcatgcatgcatctttttcgccctgaaaatcgcgggaaaccaagtatctttcaaggattcattctcaagattcggagcgtttctcataccgtttacggctattttgattcttgcccttttcttctttttattacatacagacatttgctttaccatattagccgttggtttaatcggtgcattcttcgccattcctcctgcgatgctgagcagttaccagcattcatataaagggaaggttgatgtcatttactcaacgattgtaatttatctgatcatctgcgttacatttcagcttattatcgaacactatgtcaaagaaattttccgttatatgctcttttaaaaacaatcccatcacctgctggtgatgggattgttttattgaatagacgttaagtaaattcttccgttcttcactacgccggtgtaggtccagttatatgttctgagctttggactgccgcctgattttgtgatatagaattcttcatacgtcttaatcgtgatagccgacccattttggctccagcttttcacttcatagttattaaagtcttctgttgtcccctctttatttaatttcgacacgagatgctgctggtcggaataaagggaactgcctttttcaaggctgtcttccatcagtgagaaattattttgattcacggcatctgcctgactttgcagataactgcccataaataatgtcacttgttcatctgtaacatcgccgcttgcagagctttcactgcctttgtttttcgagccagcccaggcggaagtgtatgtctctggtttatcatttttgattttctttatatttgtgcctgcagattcgaatgttgattctgcatcttcgaaaatccactttttctgttttttatcatatgaaagaagatattcataactcggactgtcgtcagtcatttcagattttgtatagtcgttatacgaagaagactggtgaagttcttttcctgttaccgatacctgccacgttccgtcgtttttctgagagagggcaaatgtgtccaggtcaaaatcagtttccaagtatctatcttttaagtatgaatccgcgcttttcatagaatcgacggtgtccttcgtctccgccttccaattggcacttgcctctgtcatctgggctgtattcccatcagatagagctttggagtattgttttgttgttttgacaattgtgttcataatctgttcctgtgtatcttgatcaggaattaacgttaactccatttctttatcatcgatcggaacgccggcagtttttgtttttccccacggaaattctgcctcgactgaagctgtcattgatccatctgtcagcagcggaccatatgttacggatttgaacggatctttatgaattgacttgccgttaatcagcaaatctcccttcccgctcttgatgtcatccgctaagctgaatgtcacatcgtctgcttccaatgagagatcaacacgaaagctgctatcgccaatcgcctgaatgtcttcctttttcacaaggtcaacgacatcgtttttcagtttggctgagactgtatattcgccgggaatgtacggaccaagggtttgtgcttgatctgctttctttacagatccggcttcctctttattgacatatagatcggtatttttataattgctgctcacttcaaaataaacaggtgctacctttaagtcataatggtcaaataccagcaggcttttcccgtctttttctgcatatacgatatccttctgggctgtttcatcccgcagcgatgcaaaaagttcatcttttttgtctggatgatccttcaaatatgtaagaaacggttttacattatttttagtgagtttaagattgtcatttaccggtgtaagcagagtcgcgatttggtcctgatccccatcatttacggcctgttcaaacttgtctactaacctatcctttgaagtaaaatacgctccggttttatatgcggcgaataatataacgcacgccgcggcaatgctgctccataaaatgatggttttcttagggatcggttttcgcggagcctgccttgtttctgcagtgctagctgtttcttgatttgcctgtttgctaccccctccgatcggggtgccgcattgtttacaaaacttggctccttcattattctgggagccgcaattcttacaaaaaaacatgactttcctcctattctactaatttgataacatttactgcttttcatattttataataaaacagaatgaaattgggaacgaatgaaaaaattaaatgtctatcagactaaaaaggtggtacgaatatgcaaaagctcaggattgaattaggagaagaaacaaatgacgaactatatgatctattgctgctcgccgatccatcgaaagacattgtagatgaatatcttgagaggggagaatgttacacagcttgggccggtgatgagcttgcaggggtttatgtattgctaaaaacaaggccgcaaacagttgaaattgtaaatattgcggtaaaagaatctcttcagaagaaaggctttggcaaacagcttgtacttgacgccatcgaaaaagcgaagaagctgggggcggacacgattgaaatcggaacggggaattcgagcattcatcagctttccctctatcaaaaatgcggattccgcattcaggcgatcgaccacgatttctttctcagacattatgatgaggacatttttgaaaacgggattcaatgccgcgatatggtaaggctttatttggatctctgaaagcataaaaaagccgccgagagaaaatcccggcggtctttttattacttgtttaagttgtagaaagagttgataccgtggtattgagcagtttcagccaactgatcttcgatgcgaagaagctggttgtatttcgcaacacggtccgtacgagacggagcacctgttttgatttgtcctgcgtttgttgccacagcgatgtcagcgattgtgctgtcttcagtttcaccagaacggtgagagataacagctgtgtagcctgcgcgtttcgccatttcgatcgcatcgaatgtttcagtcaatgtaccgatttggtttactttgatcaggatagagttgcctacgccgtttttaataccttcagaaagttttttcgtgtttgtaacgaagaggtcgtcaccaacaagctgaacttttttgccaagacgctcagtaagaagcttgtggccttcccagtcgttttcgtcaagtccgtcttcgatcgagatgattgggtatttagaaacaagctcttcataccagtcaaccatttcagcagatgttttcacaacgccttcgccagacagatggtatttgccgtcttctttgttgtagaactcagaagatgcagcatccatagcaagtttaacttcttcgccaggtttgaagccggctttttcgattgcttcaacgattgtttgaagcgcttcttcgttagaaccaaggtttggagcgaatccgccttcgtcacctacagcagtgtttaagccttttgcgcttaatactgatttcaggctgtggaagatttgagcgcccatgcgaagtgcttcacggaagttaggagcacctacaggcatgatcatgaattcttgaatatccacgttgttatcagcatgctctccgccgtttacgatgttcatcatcggtacaggaagcgtttttgagttgaatcctccaaggtattggtaaagaggaatctgtaagaaatcagcagcagcacgcgcacaagccatagatacgccaaggattgcgttcgcaccaagtttacctttgttttcagtaccgtcaagctcgattaaaagctgatcgattgcgttttgttcagttacatcaaagccaagaagctctggagcaatgatttcgtttacgttgttaacagctgttaacacgccttttccaaggtaacggtctttgtcgccgtcacgaagctcaaccgcttcgtattcacctgtagaagctccgcttggcactaatgcgcggccgaaagctcctgtttctgtatatacttcaacttcaactgttgggttgccgcgggagtctaatacttcgcgtgcataaacatcaacaatgtatggcatgagttttgtctctccttttgattttcaaattatttttgaattaaagatgttcctgtcatttctttcggtttttcaacaccaagaaggtctaataacgttggtgcaaggtcgcctaggattccgccttcacgcagcgtaatgccttctttcgttacaatcacagggactgggtttgttgtatgcgcagtgtgcggttcgcctgattctgtaatcagaatgtcagcattaccgtgatcagcggtaatgatagcgtgtccgcctttagcaaggatcgcgtcaacgacttcgcccaagcattcgtccactgcttcaattgctttaattgttggttcaaccattccggagtggccgaccatatcagggtttgcgaagttaagaatgatcgcgtcatgcttgtcagcttcaatttctttgacaagcgcgtctttcacttcatacgcactcatctcaggcttcaagtcatacgttgcaactttaggcgagttgatgagaatacgctcttcacccgggaattcagcttcacggccgccgctcataaagaacgtgacgtgcggatacttttcagtttctgcaattcgaagctgttttaacccgtgctgagataatacttctccgactgtgttatcaagatttatcggtttaaacgctacatagccgtcaactgtttcactgaagtgagtcaggcagacgaaatacaggttctttggataattctcgccgcggtcgaagtcacggaagtctttgtttgtgaacgtgttggaaatctggatggcgcggtccggtctgaaattatagaaaatcacagaatcgccgtcttggattttcgcaacaggctcaccgttttcttttgtgatgacagatggaatcacgaattcatcgtagataccatttgcatatgaatcatcaacaacatccagggcgctgcggtaagatgggccttcgccgtacgccattgcgcggtacgctttttctacacggtcccagcgtttgtcgcggtccatagagtagtaacgtccggaaatgctggcgatttcacctacaccgatttccttgatttgatcgttcaactggttgatgtacgttttcgctgtctgcggacctacatcacggccgtcaaggaagccatggatataaacctctgtcagcccttcttttttcgcaagctttaacagtgcgaataaatgattgatatggctgtgcacgcctccgtcagataaaagaccgaacaggtgcaaggctttgttgttttctttcgcgttgctgatcgcgtcaaggaatgtttgattgcgttcgaactctccttcgcgaatggcaacatttacgcgtgttaagctttggtacacaatacgtcccgcaccgatatttaagtgacctacttcggagttccccatttgcccttcaggaagacctacagcctcgcctgaagcagtcaatgtttgatgaggatactggttccaatagcggtcaaaattcggttttttcgctaaagcgactgcgttccctactgtttcgttacgtaatccgaacccatcaagaatgatgagtgcagctggttttttactcatattgaccttcctccaataattgaacgaatgactgtggctcaaggctcgcgccgccgaccaaagcaccgtcaatatcggactctgccatatattctttaatgtttgcaggctttacgcttccgccatattggatgcgaagcttgtctgcagcttcttggctgaagctttcagcgacggttttacggatatgcgcacacacgtcattcgcatctttcgctgtagaagatttgcctgttccgattgcccagattggctcatacgcaataacagaagcagcaacttgttcttcagaaagaccagcaaggccttttttcacttggtcagcaacaagatcatttgttttgccggcttcacgctcttcaagcgtttcacctacacagatgatcggcacaatgccgtgtttgaaagctgcgtgtgcttttttgttaactgtttcatcagtttcagcgaacatttcacggcgctcagagtggccgatgacgcagtagtcaacgccaaggtctttcagagcaaccgggctgatttcgcctgtgaacgcgccgctttcttcgaagtgcatgttttgagcgccgacttttaggtcagtgcctttcacagcagaagcaagcttttctaagaaaagcgctggcgcgcaaacaacagcttcagctttgtctgctgctggaatggaagatttcacttcttcaacgaagctgacagcttcgccgagtgttttgttcattttccagttaccggcgataattggttttctcatctgttccacttccttatagcagttttgagattatttatcgttcagtgcagctacccctggaagctctttgccttccataaactcaagggatgcgccgccgcctgttgagatgtggctcattttgtcagcaaggccgaatttttcaaccgctgccgcagagtctcctccgccgatgacagagtatgtatctttcgcctctgccaatgcttccgcaaccgcttttgttccttgagcgaacaagtcgatttcgaatacgcccattggtccgttccacacgacaagtttgctgtttttgatgacgtcagcatacgtttcgcgtgttttcgtaccaatgtcgattgcttctaaatcactagggatttcagagatcggcacaattttcacgtttgcatcgttagagaaatcatctgcaacgagtacatcttcaggcatgtagaagttaacgcctttttctttagcgcggtccataaatgatttcgcaagctcgattttatcctcttcaagaagagatttaccgacttcatagccaagcgcttttacgaaagtataagcaagacctccgccgatgatcaggttgtctactttatcaagaagactctcgattacaccgattttgtcttttactttcgctccgccgatgatcgctgtgaacgggcggtcaggattggaaaccgcttttccaagtacatcaagctctttttccattaagaaacctgcaactgctggcagatgctcggcaattccagctgtagatgcgtgagcacggtgggcagcaccgaatgcgtcatttacatatacatctgcaagctcagcaaatgcttttgcaagctcagggtcatttttctcttcaccaggatagaaacgtacgttttccaatacaagaacgtctccgtccttcatctcagaaatttgtgcttttacagcatcgccgtatgcttcatccgcttttttcacttctttgccaagcagttcgccgagacgtgcagcgacaggagttaaacgaagctcctcaaccacttcgcctttcgggcggcctaagtggctcgcaagaaggactttggcgccttggtctgcaaggtgtttgattgttggaagcgcagcacggatacgtgtatcgtctgttacttccccgtctttcattggaacgttaaagtcaacgcggcagaatacaactttgccttttacgtcgatgtctttgagagtttttttattcatgcctaggagatcctccttcaaaatggtttgcatacagcacgaaaaacgtgaaaccgtctgttcaagcgataacgccgctagggcagatcgcagtctttttcggcacagggcagttcgtctaaaagccagggcagcggccttaggcgaaagcgccggcaaagctgcttaaaacgcggtcgtttctctatcacagagcgttttctgaaagccggtcttcatggaaaaagggaaagggagtccgtccccttcccttgtccgctttcattatagcgcttctattcgaaagaaccaagtcaggtcctttttcagctataaattaaagacctttttttgcgatgtaagctgcaaggtcaacaacgcggttagagtagccgctttcgttatcgtaccaagagattacttttaccatgctgccttccataaccattgtagaaagagcatcgattgtagaagagtttttgtttccgttgtagtcgccagaaactaatggctcttcgctgtagccaaggattcctttaaggtcgccttcagccgcttctttaagagctgcgtttacttcttcagctgttacttcttggttcagttcagcaaccaagtcaactagagaaacgtttggagttggaacacgcattgctccaccgttcagtttgccttttagttcaggaagaactagagaaactgctttagcagcaccagttgatgttgggatgatgttttcagctgctgcacgcgcacgacggtagtctttgtgcggaagatcaaggatttgctgatcgtttgtgtaagagtgaacagttgtcatcataccgcgtttgatgccgaatttatcgttaagtacttttgcaaacggcgcaaggcagtttgttgtgcaagatgcgttagagataacatcgtggttagccgcatcgtatttatcttcgttaacacccataacgattgtgatatcttcttcgttagcaggagcagagatgattacttttttcgcgccagcttctaagtgtttcgcagcgtctgcgcgttttgtgaagaaaccagtagattcaactacgatttcaacgccttgtttgccccagctaagtttagcaggatcgcgttctgcagaaacttcaattgttttgccgttaacaacaaggttgttaccgtcaactgaaacttcagcgtctaattttccgtgtacagaatcatattgtaaaaggtgagccagcatgttagcatctgttaaatcgttaaccgctactacctcaacttcaggattgtttaatgctgcgcggaatacgttacgtccaatacgaccaaaaccgttaataccgacttttactgccatgattgtttcctcctttaaataagtgagagatatttatattgagggattattcatcccttaataacttctttgcggctccttcgtctgtgacgagaaccgtgttgcgtggctttttaaagtaagcctcgatcgcctcggcttttgatgatccgcccgctaccgcaataatatcggggatggcgtctatgtcatccagctgcattccgacagaatgcactttgtgaaccacttcgccgtccgcgttaaaatagtagccgaacgcttccgtcaccgcgtcgttatcatctattttctttaagtcttctaaaggcgtgtttctgcgctgagccatagttttagcttcgccgattccatgaaccagcatactcgctgatttaatggtgttcagcacctctttgacagaaggctcttcaataatagatgaataggcgccttgtgacagctgtcccggaacaaacaaaagccggtaagtgcctgaagccttctccgccatatgcgcgcatatggtgttcgcctggtttttcacgtcttcgcctaaaccgcctcttgcaggcacaaacaaaagctcgcggtttttagaatccggcgtcatcatttcggcgacagcttcaattgtcgtaccgccagttacagcgacgatatttttgcctgaaaatctttttttcatacatgcgacagccgctcttcccatttcttttttgacccatggggattgatcgctgtctccggatacgataatggcatcctttagatttaaacgttcttttaatgtcttttccaaaagagtcaaacctaaaacatctttcatcgtatcttccaaaacagaaagcagttcatagccctcttctgtcaatgtcatgccgtttgtcttaatatcgaccaggttctgttcctttaaaaactgaacctcgcccctcagcacacgctcgctgatttcgagactggcagacaggcttcttcgcccgatgggttctgtcagcctgatatactgcaagatttcaaacctcttttgcataacgagcagaagatcaggcaataattttttttgagcttgtattaactggttcatgactcaaacgttccttccttttttgctggacgttatatgtcccgctatgacaaaaaacgtcccgtcatagccaaaaaaaatcatttctgctttctttaattattttaacagggtggaattgtttattcaactgttaagagccaattcatcgacaatattcgcagagttttcatgccgcgtcgttttatccagcaatattttatcctatatatctttatcttatacagaaagcgccaaatggtgcatcccaatataaacagcccttcccgtagaaagggctgtttcattaaagcgttttcattttatccaaagcttttcaatttcctcgagcgatttgttcttcgtttccggacagatcgtaacgacaaacaggaaacaaaggatgttaatcaccgcaaagatccaaaatgtataggcgagcccgaaagaatcgatcatcattggcacaaactgtccaatcgcccagtttgctccccataaaaagatggtcgcaatgcccgcggcccgcgcacgcagatggttcggaaagatttcagaaatcataatccatgtgatcggtccgaccgagacacagaaagcagcgacaaaacctaatataaggacgatcatcatgatcccgcttgttaactcaaagtaaaacgacgtcccgattaaaatcataaaaatagccataaaagcagaaccgatggacatcagtttttttcgtccgactttatcaatcagcaacaccgcaataacggtaaagatgacttctacaacaccgacgatacaagttgtcacaaatccggcgttttgcccgaatcccatcattttaaagatttccggcccgtagtaagtaatcgcgttcatgccgatgacttggttaaagagcgccagcaggattccaatgacaagcgcctttctgagccccggcttaaacagctgggagagcgaccccatttgttctatttttaaagagttctcaatgttctttaattcttcttttgcaacagtttctccattaatacgtgtcaggatctttaaagcttcatttgttttgcccgctttcgccagccatctcggactttccgggacgacgagcaggacaaggaaaaagatgacggacggcaccattccataagcaagcatccatctccagccggtgtgcacgccccattcgtatgttccggaccgctgcacagctagattaataaagtatgtagcggaaatacccagtatcgtaaagagctgatataaggaagataaacttccgcgtatggcgggcggtgccgcttctgtaatatacgtaacagagagcgatgagcccatcccgattcccagccccccgataatccttgcaatgattaaggtggacacgtcttgagaaagcgctgaaacgattgctgatatcgcaaataacaaagcggctgtcattaaaatttttctccggccgaatctgtcacttaaaaagccggatatcccgacgcccacaactcctccaatcataatgcttgaaatgacaagtccctccataaacggactcaggctgtataaatctttcagaaaaccgatggcgccagaaatcactgccgtgtcatagccatacaataagccgccaagccccgccgcacatgagatcaaaatgacaaatcccattgaatggcttcgtgttacaggaacatttggttctaattgagttggagtattcttcatttccctgccctcccgaatgttgagtaaagcgttttcatttaaaccttaaattgtacgtacttatattaaaatttaacgaaaattacatttaattagtacgtacaaatatagaataatcttgtttgcattttctgtcaatgttttcttacaaagaacgctgtgatatactgaaatttgtccgtatacattttggaggaatggatatgttaccaaaatacgcgcaagtaaaagaagaaatcagttcttggattaatcaaggcaaaatactgcccgatcaaaaaatccctaccgaaaacgaattaatgcagcaattcggcgtcagccggcataccatccgcaaagcgatcggagacctcgtatcactaggtctgctgtacagcgtgcaaggcggaggcacctttgtcgcttcacgctctgctaagtcagcgctgcattccaataaaacgatcggtgttttgacaacttacatatcagactatattttcccgagcatcatcagaggaatcgagtcctatttaagcgagcaggggtattctatgcttttgacaagcacaaacaacaacccggacaatgaaagaagaggcttagaaaacctgctgtcccagcatattgacggactcatcgtagaaccgacaaaaagcgcccttcaaaccccaaacatcggctattatctgaacttggagaaaaacggcattccttttgcgatgattaacgcgtcatatgccgagcttgccgcgccaagttttaccttggatgatgtgaaaggcgggatgatggcggcggagcatttgctttctctcggccacacgcatatgatgggtatttttaaagctgatgacacacaaggcgtgaaacggatgaacggatttatacaggcgcaccgggagcgtgagttgtttccttctccggatatgatcgtgacatttacaacggaagaaaaagaatcaaaacttctggagaaagtaaaagccacactggagaaaaacagcaagcacatgccgacagccattctttgttataacgatgaaattgcgctgaaggtgattgatatgctgagggagatggatcttaaagtgccggaggatatgtctattgtcgggtacgatgattcacatttcgcccaaatctcagaagtgaaactaacctctgtcaaacatccgaaatcagtgcttggaaaagcagccgccaaatatgtcattgactgcttagagcataaaaagccgaagcaagaggatgtcatatttgagcctgagttgatcattcgccagtccgcacgaaaactgaatgaataaaaaaagcaatgtatgggtctccccgctacattgcttttttttatagctgttatctgttgttccaaacgtcagcgatgatttcaaacgaacgcattctgtctgcgtgttcaaaggtttctgagttaaccataatttcgtcagcctgtgtcgttttgacgaaatcttcaagcttcgccttcacttcttccggacctccgacaatcgtggagctcagctgctcattgaccatcgctttttcatacgggctccagatttgatccatatcctcaacaggcggtttaagctggttcggcgtaccgcggacaagatcaagaaacctttgataatgcgaagtcgcaaggtgctgcgctttctcgtttgtatctgccgcgataatggtgacaccgaccatcgcatacggttcgtcgagcacgtctgacggcgtgaaggaattgcggtaaagctccaatgcaggaaccgtattcgctggtgaaaaatgagcggcaaaggcaaacggaagacctagttcacctgccagacgggcgctgaagccgcttgagcccagcagccaaatcggcacatctatgccctctccgggaatggcgcgaacttgattgcgcacatttcctgacggtttaaaataattgcgcagttcctctaattgttctggaaaatcctccccgctgttgatgtttctgcggagcgctctggctgtcaattggtctgttcccggcgcacgtccaagccccagatcaatccgcccgggatacagtgtttccagtgtgccgaattgttcagcaatgactaatgaagagtggttcgggagcataatgccgccggaaccgacgcggattttcttcgtgcctccggcaatatggccaatcaaaactgcagtggcggagcttgcaacaccttctatattatgatgttcagcaagccagtaacggtgatagccccattcctctgcccggcgcgccaagtccatgctgtttcggaatgattctgcaatcgttcctccctgaacaaccggagataaattcaagacagaaagcaaggtatctttgcgttggttgttagacatattgttctcctttgcaaatgtgttatcagtaaacagcccaaagctgtcaggtcatgattgaaagaacttctatcacaccataacacaactgcattcaggaataaaagaattttattcgatgaaattcgaacaatgtaaaacgaacggtttggcccgctattctgctccaaacagctccttagccatctcaataaagagcttagccgccagagaagcctcctttagcgacggaacagcaagctgcacatcacggtatacctgcgggtccaattcccgggtcaccacatgctccggaagcggcatccccgacatggacatttctgataaaatcgcgagacccaggccttctctgatcatactgatcgaggtgttgatgttatagaccgtgaaagctgggtgcagcgtagcgcccgcctgcctgaacatatcgacaaatggtgattcatagcctccgtcacagacgatcatcggttcatggtcaagatctttcagcgtaatggccgaatgactggcaagcgggtgatcgtccctgagcacgacagccattttgtcttttttcaaatgaatgtactccatctcctctgttggatacagaagaatcccaacatctatcatccgcgtatgaagccactccttgacttcatttacagttccctcgtgcagcacgagctcaagttttggatatttttgtttaaattcactgatcagcttcggcataaaataagccgaggcagttgagaatgtgccgatatggatcgttcccagttcaagccctttttccgctgctgctacctgctcaactttttcaatgccttttaagacttctctaatgtatactaagatctgttttcccgtatccgtcagcatcaggccattgcggcggtcacgaatgatcagctttacatcaagctcagcttcgatcgcagaaatcgcatggctgacagccggctgtgtcatgttcagcgcctgacccgcttttgtaaagcttcccgtttcagctattttcacaaaaacctttaattgtgtaatggtcataacaatttacttatgctccttataaaaaagattcattttatttatcttatgttctaccgtatcatatgatggaaaagttctacaaggagtgaatgaacaatgaagcagctctcaaaaacgcggacagctctcctgctcgcatttctcgtcatcatgtggggcgtcaattggccgctgtccaaagccgcgctcgcctattctccgccattattgttcgcgggcatccgaacgctgatcggcgggcttttattagtcattgtcgcactgccgcgtattcataaattacgcttaaaagaaacgtggccgatttatcttgtttctgctcttttaaatattacgttattctacggcctgcaaacgatcgggctgaattatcttccggccggcctgttttctgcaatcgtcttcttccagcctgttctgatgggtgtattttcttggctgtggctcggcgaatccatgtttgtaatgaaagtgattggcctcatcctcggttttgcgggagtagccgtcattagtgctgcgggctttggcgggcatatttctgtcattggggttctgctggctctcggctccgcaatcagctgggcgctcggaacggtatatatgaaaaaaacaggcagccgcgtcgattccatctggatggtcgctctgcagctgacgatcggaagcgtgtttctgctaatatccggcttttggacagaaagcttttcggcgatccaatggacagctccgttcattacgagcctgctgtttatctccgtattcgttatcgcactcggctggcttgtcttttttacgcttgtcggttcaggagaagcaagcaaggtcgcatcttatacttttttgattccgctcatatcaatcgtggccagctccattttcctgcatgaaccgctcacccttagcctcttggcagggctgctgctgattgtcacgagcatctgtctcgtgaatacaaaatcaaaagcgcagaaagctgcggcgattggtataaacgagaaagctgcacaataataaaaaccctcttgccggatgcggcaagagggtttcttatttactgatgcttgcgtcctttgaccaaatatgcaactgtaatcaaaaggtagatcgccgcagtaatgccggtaatgacaattgatgttgtcatgatgaccccgatcagaatggcgagtaatgccacaatcgcaaaccatgtcgtgtacgggaaccattttacataataggccggtgtttccgtttgctgttttctcgattttaaatgagcgaatccgatgatcagccaaatgaataaaacggtatatcccaatgatcccattaaataattaaatgtttggcttcctgcgaacagagaaatcaatacgccaatatagagagaagaagtgcacatcagaatcgcaaacatcggtacgtttttcgatgaaagcttcgagaagacctttggaagccttccgtcacttgcctgtgtatacaaaatgcgtgatgatccgtataaacctgaattcatagaagaaatgatcgccagcaggatgactgcattcatgatatgatccgcgcccggaatgcctaccattttaaagaccatcacgaaaggactttccggaaccgaattgacttggttccatggaatcaggctgacgatgatgaaaaacggcagcaggtaaaacgcgacaatccgtgtcagtgtgctgcggacagctttcgggacaaccttttccggattttttgtctctgcaagcgttacaccgataatttctgtaccgccgtaagagtagatgacgacaagcatcgccgtgatcagccctgtgccgccgtgcgggaaaaatccgccgtggtctgtcaggttggaaaatccggatgctgtatgatcaccgaatgatacaaataagagcagcaatcccagaataataaagataataataacggtaatcttgatcattgccagccaatattcggtttcggcgaagattttaacagaaagcaagtttacaatcgtgacgataagagaaattcctaatgccaacacccagatcgggcagcccggcagccaatattgaatgaaaattgcagctacaacagcttcagccgcaatgttgagcacccacattttccagtagatccagtccaaaagtaagcggcgtaatttcccaatacctgttggacaagatcacggaaggttctggcgttacggtttcgaacagccatttccgccagcccctgcataataaacagcaaaataatcccgccgagcagatatgcgagaatgacagatggccctgccacatcgatcgctgagctgctccccttaaataaacctgcgccgattgctccgcccagcgccatcatcataatatggcgggacgtcatcgtgcgttttaacgtttgattgtcgtttttcatcctcttctacctctccttctcgttttcaaaaacaaaaaagcccgccgtctcctacctaatctaatagataaagagacgacgagccttcggctgaccgcggtaccactcttgttgattcttcatgaagaatcctgcttttgacctgtaacgaaggttagccgttaaaacatagggaatattcaatctattccgttccgtcttaccactcccgggcgagttcaaagaagaatcaggctgcgtcgcaccaccccgcagctctctgttctgatcactttcttttactgctcccaatctatgtgttttagttttctgaaaaactcaaattttatgatctgaatatattaacataatatacgtgcttctcttttaactgtcaataacttcagagaaaaaagaaactgttattttgtcccttttcgaatggctttccaaaaggattctgactcgtttcctaatgcgtaaactgaaacacctgctattttatattgctttgccagatggcttttcgtttgaacggttttttcgttttcataccacacgacatgtttatgcttctttttgtcaacataagaaaacgtcatcgagcctgattttttgttgaatgccggctttgctttttgttttttgatgagggatttgagctcattccattcccttattgtgctggtacttccgtcttttacatcccagtcatagccgtacgcagggattcccatgatgactttattggctttgatctttttgactgaaaactgcagagagcttttgatccagtttgtgcttgccactgaccccggctcaccccaaatgccgtgttcatcgtaggtcatgacttgtacgaagtcggcatatttgccgattttcgcataatcatacggccagctccagtcatcatttttatcatcggcgcttttggccggaacggataccattgttttaatatgtttcttattcaaagcctgtgagacatattgaatgaagttcgagtatgcagcgcggtcttctggatttactgcttcaaaatcgatattgattccgtaatatgagtgctttttggccagtgtaattaattgatctgtgaatcgttttttcgctgttttattgctcatgacccgactcgctaaatctccgtcaaaatcataaatggcatcattatagtttgaaatgacagcccatgtcttgatttttttctttttcgcatatgtcagctgcttagttggggcatcgccaatgatttgtccgtttttttcaaacgcaaatgtatcggttgcgatggcattcatgtatgtatgatatttcgtaagagaattgtatgaagccgtatccccagtcgtgtagcctactgtcataccggctgccttcgcttctccttttgtatacataaacagaacaatcgcaatcgccagtgaaaccgctatgatcagccattttttcattgcatttcctcctgtatcaagtcatactcttctcatcggccaaaaaattggaagttgaagttttttcaagcaaaaagcccggcatatgcctgccgggcttcctgagttcagcggtcagagacgagaatatatgctgcctttactggtccatgcacccccacaactaaatccatttcaatgtcggctgagttactcggtccggtaatgtagttgatacatgaaggaacagtgacaccgttcgcaatgttttggcggatgatatcactggcttgtgtcattctcggtacaatgcttgatttcggcacgatcgcaatataagtcgttggcaaaaggctgacagagcggccgatgtcttttgaggagaagaggacaaccgtccccgactcagccaatgtaatttcgctgaatgtaatccctacattggcttgctccgcttttttaatattttcctcgcctttgtcagcatcccactcccagaccggcgttccttcactcggccagtccttggtgagcaggcttttcagtccgtattcttcaaagcgggggtccttcggaatgatgacagggcctccagaaaagcggctgacttgctcgcgcagggcatcgtaaaggccggttgaatccgtttcaatcagctctgtatggattttgacgcaatggtttttgagcactgtgactaagtcatccgctgaataaccttcaagtgttttatattgcggctcatacgcccattcagggactgccacgcctcctgttcttctttcacggcccaggctggatgcgattcgatttaaaaagctctcttgattctgaatggttcccttcgtcatcactgctcctccttcgtgcgttcacttgtttctctgtccgcaaaccagtctctgaatctcgatttatgcggtgccgggaagtcacggatctgggtccaatttttaagcgggccgggccctttcgaaattttttcgtcctctgtaaaaggcgtcatggcggccggcgcccattttgagcccattttgtaaagcgataaagaggatgcgccaagtccgaatgctttcattgcaagcttttcactgatcggcgctctgccttctttttcgacgatattctgacgatgcttgagtagcagctcatgaagcgggattttgaccgggcaggcttctgaacaagcagcgcacagtgaagacgcgtacggcagctccttataatcgtcataaccgccgagcaacggcgataaaaccgctccgatcggtcccgagtagattgagccgtatgaatgtccgccgacatggcggtacacaggacagacattgatacaggcggcacagcggatacattgcagcacagactggaattccgttccaaggatattggatcgtccattgtcaacgatgacaagatggaattcttccggaccgtccacttcaccttccagcttcggacccgtcaaagctgtaatataacttgtcagccgctgtccgacagcacttcttgtcagcatgctgacaagcacttcaaattcagaaaatgacgggacaatccgctccattcccatgacggtaatttgtgttgtcggcaaggtgctcacaagccgtccatttccttcattggtcacaaggctgacagaacccgtgtcagcgatggcgaagttacagccggtaatgccgatatccgcttccagaaactttttccggagaatggcgcgcgcatgcatcaccagctcttccggtttttctgtatgttgatagtccagcctttctttaaacacatcgcgtatctgctctttatttttatgaagggcgggcgctacgatatgtgacggcggatcgtgatcatcgatctgcaaaatatactcgccgagatcggtttctacgacttcacagccttccttctccagcacctcattcagattgatttcctctgtgaccattgatttagatttcacaattttcttcccgttcttcttttgaatgacatcacgaatataagaagacgcctcttccgctgtttccgcgaaatagacatgtccgcctcttttcgccacattttcggcaagctgtccgagatagaaatcaaggttttcaaggacatgctgcctgatttcctctgataatgagcgccactcctcccagtttcccagttcttctgctgcctctaggcgccgcgtccgcagacgctcctgtgcacctgaaacagcgcctctcataaattcattatcaatcccctgtgatacccgctctttaaaagcgtcagtaccgattttcatcgccatgatcctttccccctctgaatccagttttatctgctgttgagcacttcggcgatgtgcatcactttgacattcttatcttttcggccaagccgtcccccgatattcatcaaacagccgcagtcagcaccgatcagcacctctgctcccgtttcctccacacattcgactttttcatcgaccatctgctcagaaatctgcgccatcttgacggagaacgttcctccgaatccgcagcagttatgtttgcccggaagctctgtaaactgcaggcccttcacatggctcaacagcttcatcggctcctcccgaacacccagcagcctagtcatatggcacgacgtatgtaaggtcgcttttgtatgaagggtcgcgccgacatcctctactccaaggacgttcacaataaaatctgtcagttcatacgttttatccgccagctttttcgctttatcggcccatttcggatcatcctgaaacaggtgcggatactcccggaacatcgttgtacaggaaccggaaggactgacaacatattcggaatcctgaaacgtttcgatcatccgtttcattgcttttttggcgtcatgtacatagccgctgttgtatgccggctgcccgcagcaaatctgcccttccggaaaatcaacctcgcacccaagccgctccagcagctcaaccgttgcttttccgacatttgtttgaaacatatcaacaagacaagtgacaaaaagtgagactttcatgatgaacccctctctcatccccaatatatgatcaggtcatctgatgacctgagttaaaataactatatgaatatcgtacactattctgacaatggaaggaaagagttttctagggatattttcatttgtggcatatcaaaaacactcccgatctcccaggagtgcagtatatggttaaatccagcccttttcctcagcgatgctggcggcttctgtccgatttttcgcattaagcttttggatgatttctgagatatagtttcgaactgtgccttgagataaatagagctcaagcgtaatgtcttttgttgtcttgcctaaagccgcaagcctcagaatttcttgctctctaacggttagcggattttcgtctcgcatcatattaaacgtcagctcagggctgaagacacgttttccctttacacattttcgaatggcatcggccagatcgtcaatttcgccgtctttcagcagatacccatgtgcaccggcctttacggcgcgttcaaaatatccggggcgggcaaaggtggttaaaataatgaccttgctgacgcagccttttttcattaattcctctgccacatccagcccgcttcgaaccggcatttcaatgtccataatgcatacatccggctccagcttcaaaatagcatgtagcgcctcttccccgttcaatgcttgtccgatgactgtcatatcctcttctaaatcaagcaaggatcccaaagcgcctaaaagcatgcgctggtcctcagcaataaacagacgaatcattcttttcgtcctccaatcattctgcttttttaataagcggaatcgtcagtgccacaaccgttccgttatgatctgaaaccgttaatcccccttcaatgagcatgagccgttcttccattccccacaggccattcccaaacattttctccttcggcgctccctttccgtcatcccgtattacgatcctcattttgtcagcaaattgagaaatggtgatggcacagtgggttgctttgctgtgcttgataatgttagtcacggcttcccgcatacacatactgataatattttgagtgacgggagatatcactgaaaagtcgtcggctccttcgtattgaaaggtaatgttccccgctcttaatatgtgctgaatgtttacgagctcctctgttatcgtgaccgttctcatatcagaaaccagctctcgaacttgcttgagtgcggagcgtgaactggtttccatttcttttgcctcaagcttggtccgttctggatcagatgcagacagccgctgaatgagctggctttttaatgtaagcagcgacagggtgtggccaagagtatcgtgaagatcacgggcgattcgaacacgttcctcccttttagagagttcttttatctgttcgttggcttgtgcaagcttagcttcaagctcaatcctccgaaacatagaacgaattccgaatggagaaatgagcataatgacgagaaacgggagaacagaaaaaagctcccgaagcgagaccgaattcgcgataaattggtataggcatggaaaaagcagtataaagattaaagcgcagaacgcacggttaaaattcgttttctctttgtaataaccaacaaagtttgccggaaaaaaacctaagtatatataggtgatattgtaaaacacactatacatcaaaataaccgccatttgcacgataagccaatatgtaaacgaagctttgcccacgctgcagaataactggcgatatgccgctacaaaaaggagcagcataccatatccgatcccctgtttgacccctgattcttttaataaagagaggaacggcataatcgtatacaccagaaagatataagggaaaaacccgaattccttcgggaaaatagatattgcctttttcatgtattacaccgcttcttgttttcttcttatatatttagatagtagcatgaagagcatcatataagcgattaatatcagaatatttttccaagtcggactcccaccccggacaagttcccacgctccgctcccgaaatgataagacggaagccactggccaatgctctgcatcatgtcaggcatgacctcaaacggcatccacatccctccgcctaaagccagcagcatataaagcacattactgattccggccgctgtttctacttttctcatgaggccgattagtgtgcctaatgctaaaaaaggcaatgcgccaaacaaaatccacagtccgctcatcatccattcaaacggtgacaaggcaatatcattgatgattgcgccgaacagaaatatgacggtaattgataaaacgtgaatgacactttggccgatcatctgagctgataaatagatatgatccggaagaggcgtaaggcggataaaggcggtccagccttgtgaccgctcttgtaccattcggatgccaagcgtcatgatagaggaacccatcacgctgaagactgtcatcgacatcaggtaatgggcttcccatgcacgttgatcagggacgttggtattcactacatttgtaaagaaataataaaaggcaatcggcatgatcagagaccaaagcacaaagtacttgttcctaagcacccttttcatttcagcgatgctttgcttttgcagcacgttcactcacatcgcctccctgttgccgtcagccagctggcgaaatgcctcatcgagcgttgcttgctcaattcgaatatcccgtgcatgtatgttttcttgaaagatcagcgccaacactttgtctgtatttgatgtctggatgatggttctctcatgctcgtggatcactctctcgacttccgggtgacaagacagcctttccaatgattcacttgaatgaagcgtaaaggaaacagactgtttttgaattcttgagcggatttgcattggtgagccgtctgcaacaagctgtccttcagtaaaaaataggattcgctgtgcggcatcatctgcttcctgtaaataatgagttgaaaaaataatcgtttttccttggtccgacagtccgtgaatggtctgccagaatcggtgtcttgatgaagtgtccatgccgactgtcggttcatcaagtataagcagctccgggttcccggcaagagccaaagcaaagctcaaacggcgtttttgtccgccggataatttttctgctcttgttttcaaatcttctttggtgagtgctgttaacgaaacgagttctttcatggacaatggattcggataatagctccggaagagttcaaggatttcatccaccttaaggcccggcatgacacttacttcctgaagcattacacctattttttcacgaacctgttgatcatcgggaacccggttaaatagtttgatttctccctcactcggtttcagcaatcctaatatcatcgagacgacggtcgtcttccctgccccatttggcccgagaatggctgcaatttctcctttttcaatactgaagctgatgtggtttacagcggtttttcgctggaaatgttttgtcacgttgcttactgttactgcttctttcatcacatgagcacctcctgatcgtttacattgattgtaaaatgacggagaagacgatgttagtatggggtgtcatgatgatggagtgacaaatgtcatttttttctcaccccggtgtctaggcaatcctcctcctgcatcttccaattcatccatcttttctatctcccatgtcctctttcttttaaactgctgtgacattcatagaaagatacactcttcaaaccatccgagtgttatgatagaaatattgaactttatattactttccggctgaaaggagccaatcatgaacgaagcgattttgtctagaaatcatgtgaaggtgaaaggcagcggcaaagcatctatcatgttcgcacctggttttggatgcgatcaaagtgtgtggaatgccgtggcacctgcctttgaagaagatcatcgggtgattttgtttgattacgtcggttcgggacattcagatttgcgcgcatatgacctgaatcgttaccagacacttgacggctatgcccaggatgttcttgatgtttgtgaagctttagatctgaaggaaaccgtgtttgtgggtcactccgtcggggccttgattgggatgattgcatccatccgccgcccggagcttttttccaatctggtgatggtggggccttctccttgctatttgaatgatccgcctgagtattacggaggatttgaagaggagcagctccttggcttgctggagatgatggagaaaaattatatcggctgggcaactgtatttgcggcaaccgttctgaatcagccagatcggcctgaaattaaggaagagcttgaaagccgtttttgttctactgatcctgtcattgcccgccaattcgcgaaagcggcgtttttttctgatcaccgagaggatctttcgaaggtaacggttccctctcttattctccaatgtgcagatgatatcatcgcacctgcaacagtaggtaagtatatgcatcagcatctgccttatagcagtctgaaacaaatggaggctcgcggacattgccctcatatgagccatccagatgagacgatacagctgatcggcgattatttaaaagcacacgtgtgatataggaacgaaagggatagaggtgaccctcttagatggacaaacaattgaatgatgcaccatgcggtttcctcgctttgtcagaagaggggtcgatcatagctgccaaccgcacccttatcaagattctggattatgagccggagcaggttatcggccagcatatgaatatgatgttgacaattcccgcacagcttttctgccagctttatttttttccgcttttgaaattggagcatcacatcgaagaaatatacatttccctgaaagctagagatggagaagaaattcccgtccttatcaatgctattgcgagacacgatagcggggcttctgtctttgattgtgttctgattccaatgcgaaagcgaaatgaatatgaaaatgagctgctgatagccagaaatgaggctcaggaagctttgcttgccaaacagaaagccaatgcggagttagagattgccttggaaacgctgaaagcaaaacaagaagaacttcttgagatcaataaacaaaatcaacaatttaaattaaacaccaaaagagagcttgaactcgccagaaagatccagaaaaactcgttgactgaaccgattgtaaacgatcaggttcagattgactcttattacaacgcatcgagtgaattgtcaggtgatctttacggatattatcaaatcgatgaacaccgttacggcattattatccttgatgtgatggggcacggaatttcatctgcattgattacgatgtctcttcatcctttgttccagcgccagatcacgcaaggtctcagccccgttaaagttatgaaggaattggaccggcaccttcacagcttgtttcaaaatgatgaggaagcaagacattattgcactgctatttatctcgagattgacatagcacggcaaagaattgattatgtcaacgcaggacatccgccggcactttggcaggacgatagcggaactcaacatctgcttcacgcgacttcgcctccgatcggaatgtttgaagacttagtatttcagtcaagcagcctttcatacacggagggcggaagattgcttctgtatacggatggcgtgatggatcctacggcttcatgttatttatatgatttactaaaggatcatcctgattcgccgatcgctgaccagaaggagaaaatccttacatcactgcagcatcaaaaggaagctcatcataagagtgatgacgaatgttttatattagttgatgtaaaataaaatgatccatgagacataacaatgatttgttacatctcatggattttttgtttcagcgtttctttggaatatgtcctgactccgcatattgaaacacctgcaaggaaggcagcgggtgtccattaaaatcaaataaagcttgattatctacagcacttcccccataccacttcccggcgtcttcagggtcgtattcagcagcatagctggacgcccaccctgacccgtatgtttcccataacactttgtttttctctatctgtgttttcggtccgaccggaatccacgcaggctcccagtagaaaacaccaagtcctgctttgcccgtattcgccactgcctccattacatctcttactgcagttgcctggccttgaacagaaattggatatggcagcgtctgcccgctttttggtgctgtatttccatgcccatcgccatcctcggcggtataggtgtacgatgtctccgccaccatgacttttttgccgtacgtgttggcaacagccttcagcacggaggtcaaattttgtaatgtgccatgccagaaaggataataggagctcgcaaacacatcataatccactttgtttttgctgagtgtttccgcaataaatgaataccttccagccgtttcaggattggtaaaatgcagggcgaccaaaatatttgaatttgtctccctgaccgctcggcttccttcattaaataattggcacatcttcgtccaatcagtctcaccggcaaatcctcctgttgtttcatttccgacctgaaccatgccgatgtcaacgccttccttgatcatcttttgcaggctttgtttcgtatactcatagagctttgctttttttgcttcaaagctgagattcacccaggctttgggcaccttttgtttcgctggatcggcccagaaatcagagtagtgaaagtcggccagcaccttcattccgttcgctgtcgctctttttccgatttcgatggctttttgaacatcattgtttcccccgccatacccgttgccatttgaatcatacgggttattccagatgcggacgcgaacatagttgaccccagcctgttttaaggttgtaaagatgtcctgacgttttccgcttgtattataaaaggtgacaccgctgttttccaaagcaataacgctggacacatctgcccctttgataaaatccttgttcatcccctctacttttttaacaaaaagatcctctgtccgaagctctgacacgtgcttgtccttctcaatggcagcggcatatcctgttgaactacatgcactccacacgatggcagccgcaaagaacattttcactttgcttttcatgatttcatccccccaagacttagtaagcagtttcattctatagaaaaaagaatccgcccatatcgagcggagcatcagcctaatgtgtgtttacgacaattctcacttcatacttttccatcgtcaggtcgcctgacaatatgtctcctgtcattatgtccttcacactctgatcaaacgtgaccagttgtttttcttccgtaaagttcatcacaaaaatataatcattgtcctgatcctgcctcgcttgtacggagacgccttttccgtgccgaaccggaaaaactggagaaagagacaggtctgtgatcagaccctcatagaaatcacgctgaaattgatcctccaaacgcgcgccgataaaatacgccttgccctgctgatactcatggcttgtgaccgctggcgtgcgcgcataaaaatcttcttgatacactgcttccactgaagctgtctttacatcaatcacggttgcataatccttcatttcatatatttggctgcgatagctgacagcgtttcgatccttcggatacagggtgtccgtttcaagaggctcaactccaaatatagcttgaaggtccggatgccatccgcctgtgtatgttaagtcatgctcattcacaaccccgctgatatacgtcatgactaaggtgccgccgtcagccgtaaacgcttttaaacgggaaatggtgtcctcgctgattaaatacagcatcgggacgatcagcagtttatatggtgaaaagtcttgttctttcgtgatgacgtcgacagggatatcgtgttcccagaatgtgcggtaatgctgctgaagcgtttgcggataacgttttgtcgccttcgcaaacccctgagcatcctcgagcgcccaatgattttcccagtcatataaaatcgcggtttgagccggcctcttcgttccgacaacttcggacagccgttccaatgtctcgcctaccttggccacttcttgaaagacgcggttctttgggctattgtcatgatccacaaccgctccgtgtaatttttctgatgacccccgtgatttgcggtattggaaatagagtacgctgtccgagccgtgggcaatcatttgcatggatgacagcagattcatgcccgggcgcttcgccttgttgacgttatgccaattgaccgcgcttggcgtacactccattaataagaaagactgctgcttcaagcttcggtacaggtcgttgataaaaccgaccttcatcgctaaatcagctgtgctttcccagtcattgtgccagacaggataagcgtcccagctgatgacatcgacatgctttgcaaatttgctgtagtcgaggccctgatacgggatcaaatccggtgtgtcagccataaaattcgttgtgatagggatatcaggcgtcagttctttcagcggaatgatttcatttttataaaacgaaatcgtttgatcggtgacgaaccggcgccaatctaaattcaggccatgcaagccattttcaccgatcggcgaagggctttcaatttgtgaccagtcattgaacgtatggctccaaaaaggagtccaccacgcatggttcaatgccttgaggctgttgtcatatttcgatttcagccactcccggaaagcatgctggcataaatcacagtggcaatctcccccgtattcgtttgaaatgtgccacattaacagcgccgggtgatgtccgtatcgttctgctaataagcggttgatgtgccgtgttttttctcggtagactttagatgtgaggcagtggttgtgccttccgccgtgcagctgtttgacgcgggaggcattgacgcgcaaaacttccggataggtttgcgacagccaggccggacgggctccgctcggcgttgctaatatgacccggccgcctatactgtgaatccgctcaaaaatatcatccagccattcaaattgatatacaccctcctccggctcaagtgcgctccatgcaaaaatgccgacagaaaacgtattcgtatgagaaagcttcatcagtttgatatcgtcagctaaaatatcgggccgatccagccactgatcggggttgtagtctcccccatggagcataaatttcgcttcggttacgtgcgttttttcaagctttgacatcacattctcctcctttttctcttagcccttcgttccgcctgcggttaatccggacacaaaattcttttgcagcatgataaagatgagggcaaccggtatgctgataagcagggctccggccgcaaatgtcgtatagctggcccccatgacatcattcactaaattgaatagaccgacgggcaatgtatatgattcaggcgttctcaatatggttgaggacagcacaaaatctccgagcggaccggtaaagccgttcatggccacgactgccgccatcggttttgataatggcagaatgatctggaagaagattctggtgctgctggctccgtcaatcttggcgctttcgtctaaatccatcggaatggaatccatgtaccctttcatcaaatacgtattcatcgggatcaggccgccgatataaagcaagattagcagccagtggctattgatcattcccaagatttgcgccagcacaaacaaggcaattaaagccgaaaactgaggaatcatctgcagcaataaaaagagcgttaaagcgtatttcctgcctttgaagcgaaagcgcgaaaacgcataggctgtaaacgtcacacagagcaaagaccctgccattgtaaacaggctgatcttcattgagttgacataccactgcacatattgaaggctttctttgcccgcaaataattccttgtaatggtcgaatgtcggatgcttcggaatgatggatgtactgattaagctgttgccagggttaaagcttgcgcctgccgtccaaaggagaggataaacaatgatgaccgccataaaggctagcaacaagtaagagaaaaggagacggatatattttctgactttcatatctgccagcataccttatgccccctctttaaaagactttgtctgtctgaattgccacaatgcgatggagataacaaatacagataataaaatggttaaagccgcagcaagagaatattggctggactgcattgtcaatttataaatccatgaaacgaggatatctgtcccgccggctgttgatccggttacagccggacctccgccattgaatagatagataatattaaagttattaaaattaaacgtaaactgggtaatgataatcggagccattgcaatgaacaccatcggaagcgtgatgtatctcagctttgaaaagacagaagcgccatcaatcgtagctgcttcatacagatcgtccgggatggattgcaatacgcctgttgagacgagaaagatgtacggaaatccgagccagccctgcatgagaatcaacgcaagcctcgaccaattggcatctgtcatccacggaagcggatctatcccgaagaaagccaagatgtcgtgattcatcgcaccgaagctatcattaaacagtcccgcaaaaattaaaatcgtcacaaaaccgggaacggcccatggcaaaatcagaatcgtccgaaaaaaacgtttaaaccgaaggtctttctggttaacaatgatcgcgagaaaaatccccaagctgacttgcagtgtggatgcagcaagtgtccaaaccaccgtccaagccagtacatcaaaaaaagtcgacctccaaatatcaactgtgaaaatatttgcgaacgtttgaaaaccgacccaatcaattaattttgcaggaggagaatgatacaaatcatagtttgtaaacgctaatgcaaagctgaataagataggaaagatcacggcgaaaattaaaataaacaaagaggggccgctgacgacataaggatagccctcagaaatgatatgttggtattgttcctttaaggaacttaatggcttattttcatcacgctgttttccgctttggaacgcatcgcgaagattcacataatacaccgcaaggccaaagcaggtcacgatgacagcgataattccttccgccagcagaaaaacggaattatcccgcggcacttctgttcccagtgtaaagattccccaaaaccccatattgagcagatctccaaagaccgcaaaaaacgatgcgcctaagaaaagaaagacaataccttttatccattgcttgttataaaattgcccgagtcccggaatgatagaaagcaacaaagcgacttgacgatgctgcaccgttttcacctctcttacaatacaaatctagctttctctttattttccgctgtgctttgccttaatttgtcctttggccgtttcagctgcttgatccaatgcttgtttcggatctgccttccctgttgcaaccgtctgtaatgctgaatcagccggcgtccatatttcattcatttccggaatatttggtgttggctctgagaaacgggattgttcagtaacagcccgtgccgcctcgcttttcataatagccgggtcattggctagggatttcacagcaggaacttctttcgtttcttcatatcgtgttttagaatttttttcatttgccaggaaaacggctaattcttgcgccagttcttcattctttgtaaatgcactaacgttgtagcttttgacgccgataaaggagctcatgtttttcctattttccagcttcggcagtttcgtaatgccataattgattcctgctttcgaaaaagcttctacattccatggaccagaaataattgcggcggcttttccttctgtgaacagcgattccaatacgttaatcccttgttctccaataatgccagccgggaacaggccatctttgtaaaacttctgaatcagcgccgcacctttgacagctccttcattattgattccaatgtctgacgggttatagctcccatctttgtcctttccaaaaatgtatccgccatatccgctcatcacactttctgcataataaatttgatcgaatagggctaaaaagccaaaattgctgccatcagctgtctttttggaatagtcgtaccactcttccagcgttttgggcaattccttttctgtgatgagatctttgttgtaaaaaagcacagtcgtttcgaccgcttttggcagtccataaagcttttgatctaccatttgagactgaatggaagcgtcagtataaagtgattgaacgtcttttttgacatgtaattccttgagtaatccttccgtgacagcggttccgatttggtcccctggcattgttaacacgtcagggcctgtgccggccggtccgtccattcgcaaatcttcaatctgcttggcatacggtttttcaacgactttgaccttcacatcatgctctttttcaaacgcagcaacggcgtctttaatgccgatgctcttttctttatcctcccatacaacaagctctgacccttttgaactcgatttggcgctgctgctttcctttgggccgcaagccgccaaggataaactgacagctgcgcagagcatgaatacggaacacttttttgccattttcattgattgtcaccctttcggtaggaatgaaagcgctttaaagataatatagcacgcttgagaaaatgtgtaaacaaactatttacctcatagagtaaatttttttacttaaataaaaatgacttagtgtcctaagtcattcttaattcatactcttcctgacgattaattctgcgcccacatataatgtttttaccgttcttctcttgtcctgcacttgttcaagcagtaattgaacagcgtttttacataattcatgtatatcaatatgaaacgtcgtcagaggaggcgagacatacttcgcgaagctgatgttgttgatactcacaatgcttaccctgtttggtatagcaattcctttttcgttcagggcttgcagacagcccactgctatcgggtccgctgcaatcataaaagcagtcggaagctgatcgcctaatgtgtcgatcgctgctgacatcaggcggtagccgttttctacagagaatccgcgatgacagaaaatatagcgctcgtccagcatggctttttccctcatataggatctgaaggtttgttcacggatgtccatttcatcctgattggtattcggatttttgtatgtgccgccgataaaaccgatgctcttatgccccttctcagccaggatgtttaccgtcttccttgtcatttgtgccaaatcgggccttaccgagtcaaaatgatcgggatcaggagttgaatcgatgaacacgccgttttcagtgagatttctgaggaaagccagctcttcatctgaaaatgtgccgacggcaataaacccttccgtatgttcaggaatgctctcgattccatccgctattttataagtggtcatatcgacattgaatgctttcgccagtttctctacttctaatctcatcgttttaaaatagacatcttctaattcttctttatctgtcagccaatataaaaacgcaatatgtttcaccagcggccttactgtttttttgcggtaattgagcttttccgccgcttcatagattttctcccgtgtttcatcaggaacagaaaggctttcatcgttatttaaaacgcgggaaacggttgagattgaaaatcccgcttcctgcgcgatatctttaattgtcgccattgcatctgcctccattattcagctcgcattgttttagtaaaatattttactttctttttcgcaaatgtcaagtgcacaaagccctctggctgcctcatgtaaaaagactgaaccatttgcggctcagtctcagttgttcgtatcattcggaaccggcggaattgcccgggaaatgagttggttattgcacattttcctcgaaatatcccgaaagcacatcttccacattcgtcaaatgcgccagcatggcggcttccgcctctgcaccgttcccggcagccacagcattgtaaatccgttcgtgctcctcatacagccgctgaacggaggtcttcttggaaaacagccagattttcctcgtttccctcattgtttccagcagcaatgatgacacgtgattcatcaagtgtttaagaagttcattttgagaagcgtccgcaagcgcaagatgaaatgcaaagtctgctttctctcccagctccccgtccgcttcaatgctgcccatttccttcagggcatcatgaattctttcgagatctgcttctgtccttttttcagccgctagtgaagccacgccgatttcaagcagttttctgacctcgagcagctgcttgacgtcctcttttttcatcagaagggcggctgagagcggctgagaaatttgattgagctcaaattccttcagatacgtgccttctccctgtttcatttcgacaagccccatcgcttttagcgcagaaagtgcctcgcgaaccgctgaacggctgacttgaaagctctcagcaagcgcctgaacagagtccagtttatcccccggcttcaattcgccgtttttgatcatatctaatagtgcatccgctacttcttcatatattttttttgttttaatctgtttgtatttcaatgcaattcaccccgtaacttgtaggtctggctgtttacgatctattatactctgttttgtgggccgccaaaagattttgactattttgtcaaaaagtcttgtactttgatttttttcaaaatataatgctaggtaactggtcttattacccagtcatcagatgatcatatcatctatagaaaccgcttacatatggcgccagtttatgtttcaaggaggggtttgggatgcaatggacacaggcatatacgcctatagggggaaatttgctattatcagcgcttgccgcacttgtaccgattattttctttttttgggcactcgcgattaaacggatgaaggggtatacagcaggcttggccacattggggatcgcccttatcattgctgtattggtttatcggatgccggcggaaaaagcgctgatgtccgcgacacaaggagccgtatacggattgttgccgatcggctggatcattgtgacgtctgtttttttgtataaaatcactgtgaaaacgggacagtttgatatcattcgcagctctgttctctcaattactgatgaccgacggcttcaagctctcttgatcgctttttcattcggggcttttttagaaggggcagcaggcttcggagcgccggtcgccatttctgccgcgctgctggtcggtctcggctttaatcctctttatgctgcggggatctgtttgatcgccaatacggcgccggttgcctttggggcaattgggattccaattacagccgtagaagggccgacagggattccggcgatggagatttcgcaaatggtcgggcggcagctgccgtttttatccgtatttattcctctttatttaatcatcatcatgagcgggttcaggaaagccttggagatctggccggcgattctcgtatctggtgtttcctttgccgttgttcaatatctcagttccaattttttagggcctgagctgcccgatgttttgtcagctcttgtttcaatggctgcgcttgctgtgtttttgagatggtggacgccgaaaacaacattccggtttgccggtgaacaagagtcggccgcctcaattgaaacggcgcgcacaaatccggcggcgcctgcgtacagcggcggacagatttttaaggcttggtcgccatttctgctgctgacggcgatgatttccgtatggggcattccatctgtcaaatccgcgctgaccgggcattatgaaggctctgcggtgttcttaaagtggctgaatgctgttggagaaaaactgactttttccccaggtgtgccttttttgaacaatcagattgtcaatgctgacggtacaccgattgaagcggtttacaagttggaggtgcttggttcggccggcaccgcgattttgattgccgcagtgctgtcaaagttcatcacggcgatttcatggaaagactggggaaccgtttttaaagaaacagtccaagaattgaagcttccgattttgaccattgcttctgtcgttggttttgcctatgtcaccaactcctcgggaatgagcacgacactcgggatgacactcgcgctgacaggttcgatgtttaccttctttgcgcccgttctcggctggctcggcgtcttcattaccggctcggatacttccgccaacctgctgttcggcaacctgcagaaagtcaccgcattatcagtcggcatggaccccgttctgtctgtggccgccaactcttcaggcggtgtcacaggaaaaatgatttcaccgcagtcgatagcggtggcgtgcgccgcggtaggactcgccggaaaggagtcagatcttttccgctttaccattaaacacagtctgtttttgctgctgctcgtttgtatcatcacctttttgcagcatcacgtattcagctggatgattccttaaaaaaatcctcccgtctagggaggattttatttatatcgctttctcgctgccgatgacggaatattcatttgatcgcgatattttgccacggtgcgtctcgagatttggatgccgtgttgttcatacagcaaatcgacaagcttttgatctgaaagcggttttgttttgtcctcttgattgatcaggtcttcaagatgcattttgactgcataattcgacgcatctccctctcctgaagcctcggcttttgctgagaaaaagagcttcatctcaaacagcccgtaaggcgtttgtattgttttccctttaatggcccggctcacagttgattcatgaaggcttagacagtccgccacctctctcagagtcagcggcttcattgcgcttcgccctttcagaaagaaatccttttggcgtgtgatcagttcattgataattctcgtgattgtctgttttcgctgcctcagcgcgcggctcagccagcgccactcctgatatttcgcagataaataggagacagtatcctgacaggagccggatgataaaagcgttctgtactgcggatgcagatcgatctcgggaaacgagcgggtattcagttccgctgcgatgtgcccgttttttacagtgataaaaatgtcaggctcaatatacacatcttgctctggccgggcaaacagaaggccaggtctaggatgaagagccgcgatatcatctgagatatcttgaatagtatgaagcggaattcctgcctccactgaaagcgctttccattttttttgcgcaaaagcatcaaaatgagctgaaaccagcatttccgcttgttcatttctgttcggcagccgctgtaattgaagaaggatgcattcctgcaaagatctcgcgccaattccagccggttctaatgactggagttttgccaaaacagcctccgcttccttggccgatacagataatcgccgtgctgcctcctctatatcttcttccaagtacccgtttgaatcaagcgaatgaatcagataattaaaaatctttttttcagtgtttgtcagattcatatcgagtgactgctgttttaacgcatcctgcaatgttttttgcggattacttaattgaaggcccgcttcctgtgcattcatcctgtttttgtttgttttatggtaagatagtggcggtgtgtctgtttcctttcgttcaataagagggttttccagtgagagctcatcaatgtactcggcgagttctgccgaatgatagccaagcagcgtgatggcctgcctgagctcctgtgtcagttgaggctttaatacttgtacttgctgaagtttcatatccatcttgctcactcccctttcttcattgtacatgattgagatcacaccgtatacatttatgaaaaaggagctgccaaagaaatgtctgaacttttttccgtcccttattttattgagaatttaaaacagcatattgaaatgaatcagtctgaggataaaatccacgcgatgaacagctactaccgttccgtcgtctcaacactagtgcaggaccagctgacgaaaaacgcagttgtcctgaaacggattcagcatttagatgaagcatacaacaaagtcaaacgtggagaatcaaaataaaccttccgctcacatgtgagcaggaaggttttccttctttgaggcgtgctggatgagacgggtgcttggcacgccttccatccaggtatgaaagtaattggcgtttttcccgtaggaattatcaatgaccgtgttttctttttgaagaagagaagacaggatgtggccgtgcaacctcgatgtttccaccgattcgtaacggctgaaaaaccgaatcgctttttggacgatataatccgagtatttttcccatatatacgcaatgggcaaagggttgcctgcttttttattcaagacgttcagcgtttggagaaaagcaatcgtccggcggtctgaagctgacagcaccgtgcgccagtcgtagctttccgcttctgcgtgtccctgaagcgcctggtttgcttcatgatctgttcggataaatctcagtttttgattggacggctgctgcgtgggaatgacgggaaacagctgatgaaccatatcaggcagaagctgaatgtgatttcttgaaaaataagcctgtgccgtagcataggaggctttttcccttgtcataatgtgaaggttcgcatgcttagaaaatatctctgccgtccgtttgaggttgtctttgttttgaaaataaatcgattgcggcaggatcacaattttgtggttcggataggtttggacgattttctctctaaagccttgataatacggatacagatccccgaagtttccgcctccctggcagacgatgatgagatgaggatccagctttcgcccgactggaaaattgtcaggattccagcgttttctgacccgaatcccgtgttctttaaagaaggcttctgttcctttcataataaataaatcccctacattcccatatagaggatagtcagcatatataatctctgattgtttcggtatgacgtcgagcagcccggacagtttctgtttcaggctgatcatcgaatgcttgctgtccatttcttcacctcggcagtttggaataagtgcagtagcacttcaatgacccggtcttgctcatcttctgtcatattggaccccgatgggagacagattcctcgcttgaacaaatcttcgcatacgcttcctgtatcttcatgagaataaaataaagccggatcgaatagcggctgggtatggagcggcttccacagcggacgagcttcaatgttttcttcagcaagacgttgaactacgtcatatgggctgagcccgttatcaagtgtgagcgtggtgagccagcgattggatacgcctgctgcgtactccggcataaagcggacgccgtctatgtgaccgagcgcattgttgtatctcgtgaaaatggtccttcttttctccactcgctcatccagcacctcaagctgggcaatgccgacgccggctaagatattgctcagcctgtaattatgaccaatttgactgtgttgataatgaacagccggctctcgtgcctgcgaagcgagaaatcttgctttttcaattgctgcttcatcatttgaaacgagcatccctccccctgatgtggtaatgattttattcccgttaaatgaaaaaatgccgaagcgcccgaaagttccgctttgcttccctttatagactgtgccgagagattcggctgcgtcctcaatgacaggaactccgtatgcatcacacaggcttacgatttcatccattttcgcgctctgcccatacagattgacggcaatcaccgcttttggcagtgttccatttcttttcacttcctccaatgctctttcaagggctgtcggcgacatattccacgtatcaggctcagaatcaataaagacgggcaccgctttttcatatagaatcggattggcggttgctacaaatgtgaaggactggcaaaacacgctgtcaccttcttttacctcaagtaaacgcagcgcgagatgaatcgccgccgttcctgagctgaccgcagctgctgcttttacaccgactcgttctgccagctgttcttcaaatgaattcacgagcggcccaagcggcgcgatccagtttgagcgaaaggcttctgaaatatagtgctgctccctgccgctcatatgagggggagataagtagatttttttatgcatagaatcatcctttgtttgatgtttgaatggaagaaatgatgcgtgccggagcaccggccgccgttaccctgtccggtatgggacggatcaccgcggagccggcgccgacaatgctccaagccccgattgtgatctgcggtatgacggatgcaccggttccgacgtgagccccttcctgaacggaaaccgctcctgacagcgtggcacgcggagacagatggacataatcgctgatctgattgtcgtgctctgccactgcacccgtattgatgatgcaatgagcgccgatgcgcacatccgcctgaatgatcgcgcccgccataatcactgtcccttccccgatgacagccgacttgctgacgatggctgacgggtgaatcaatgtaataaaatcatctttcctcagacccagtcgctccgccagctgttttctgacactgttattcccaacagcaatcagaaacagcacatcaggaatgagcctgcgcagttcagtaacggcttccggcggtcctgtgtaccattcttttccgccttcgaatgttttgaatttatcatccagcaccgcggctaagcgcgtatctgagcgggcgtttatcagctccctgatcacctttccatgaccgccgtcacccacaatggccacgtttttcatgaggacacatctccgcttccggtaaaccgttccgcggtcacatgattggtttgctgaatcccttctgaaacaaggacctttcgcaccgtcaaacataaaattttcaaatcgagaaaaaatgaccggttgtcaacgtaccaaacatctaattcaaatttcttttcccaggaaatcgcgtttctgccattgatttgcgcccagcctgtgatacccggcttcacctcatggcgccgtgcctgtttttctgtataaagaggcagatagtccatcaaaagcggccgcggcccgacaaggctcagatcgcccttcaggacattcaggagctgcggaagctcatcaatgcttagctttctgatcagcctgcccgttttcgtcagccggacttcatcgggcagcagatttccctcactgtcccgttcatccgtcattgtccggaacttgtatagggtgaacggtttgccgtgcaggcctggccttacttgcttaaagaagacaggtgatcctattttcagcctgacaacggcgatggtgaacagaatgatcacactcgtacagcacaacaaaaaaatggcggccgtcagatcaaaaagtcgtttcaggatcaaagattcacagctcctttcgtttttcgaaaccgttttagtaccagctgtctttcctcttttgtacaaacgagcataaaagcgaaaacagcgtagcaaaagctgactgtcactcccgtcgctatcagtgacggccatccgtcaaccttcacaacgaactgaattgccttacagaccgtccaggcaaacacagcggctgatagaggcccgattatgcctttaaagaaaacgtgctttttgtagcctgtaatgcgggatacataaagcggcgtaaagatggcattttttaaaataagagaaatggcccctgccaacgttatgccgtacagaccgagatgagccggcccgctcagcgtgaccgccagcaccacattcaccgcacctaacagcagggtaacaatcgccggtgttttttgttgattaaaagcggtccatatataaaacagcggcataaaggcgaggctgacaaccaagtatccggcatgaataaataaaagcggtgctatcgttgaaaaggacggtccgagccagattgtcaaaaaaggtcccgccaatccgcccaataaggcagcaggaagtgcaagcaaaagaccattgagccttactgccttattggcgtaattcatcaacccttccatatcgccttttgaataatatgaagtcatgataggcgcaaacagggatgcgaccgttccggccaagctgcgcaaaagcagcggaaactggataatcgccgcgtatttcccggatgcggacgcccccagcatcaaattggcggttaacagatcaatctgcaaaaaaagcaggacgccgatttgattgacggagctccatgcgcccgcttgaaacagctccttgcttgtgcggaatgaaagatccttcatacgaaacgaaaaccacggaatcagctttttgaagaaatagaaagacagcacagacgcaatgacagcaccagctaaagctgcaagctggatctgccagattttcggcgcaaagcatgcaaacaggagcagcacagacagcacccgtataagcatttgcaccgcctgaatggaactggtgatataaaggcggttggcataaaatggtgcagcaccgaaacccgccatcagaaacgttaaaataaacagcacactgccgattaaaatcgacaaacgcacatctgccaaaagcgcttgcggcacattcatgacgcggtcaataaaaaaagccgaacccgcaagcggcagcaagagcagcaatgaaatcaaaacagaggccgctaaataattgctgatatacgcatttgctttctcccgctctcccctgtgggcagcaacagaaaagaaccgaacgacaaccgagctgagcgccacggtaataaccgaaaagtaattaatcacattttgtgtcaagtgaacaaagccaaacgcttcgacaccgagcgttttgacaataaaaggcgtcatccaaaccgataggaaaacagacaagagaaaagccgtgagattcgcgctgaaatttatcgtgaatttcatgcctgcttcgcactgcctttcattgtcccccgctgctcgaaaaacagcttgatgagaaaagtgagccgccatttacacagtgctaataccaaacgctctcctcttaataatttctcatgctgaaacggtgtatgtctgacagcctgccgcaccatgtcataggataaaatctgtctgatcttctttttgatgtctttcggcgaattcggagaagcacaggcatttgccaaaagcatcggaagctggtgcctgcaaatgtacacattcaaatcttcttggcatgcgcctgctaagccatagtgattgtagaatgcgattttagcttgatattgtttttgaagatgttcatccatcgccggcttataagggatttctgtcaggctgttcgggttttcacgataaatgtacaatccttcatcaagcattttcacccgctccgcttcgcaaaaagcggacaaattgaagggagagtcttcagcaaaacggatgtcttcagcaaacagcagattcgccctatcaaaaagctcacggcggtaaagataacgccatacataccagataaatctcgtttcgtgagcatgtttaagctgttcagtcatttctcgttttgtcagcacgcggtttgcctcaagctgcggcggcacatatgtccgcctgtccgatgactgtttgtaaaaaccgcatccgacgatgtcgagccgattttcctccgcttcttcagccagcctctggaacatggcggaaaatacataatcgtctccgtctacaaagccgatgtaagtgccccgcgcggcctttattcccgtatttcgcgctgaactaagcccgccgtttgcctgatgaatgacccggattctcgcatcccgttttgcataatcctctgcaattttgcctgaacgatccggtgttccgtcattcacgaggatgatttcaatatcagaaagcgtttgacgaagcaaagaatcaatgcactcccctataaatggttcaacattatacatcgggacaataatgctgacgagcggggtcattgcgcttcaccgctgattttgtcacgcagacctttaaaatacacatctctcggaaagcctgcacgggatgtttcttttgttaaaagctcattgactgcggctgttacgcgctctggctccggatgttctatcagcttcatgaacgggatgtctttaagccattgatagccctccatcaccttatggtcaaaggagcgaatgacaacacacggcgttcctgtcagcgcgcaaaaaatcatgccatgaagcctgtcagtgacgacggcttctgcgctttgcagcttagaccacagtgcttcaagttcttgttcgcgtgtatcgcggctgacccggcggccgatcgttgtcgtaaaggatttgatctcgccgaattcctcacatagcgcagccttgacccggttcctctggtcctcctgaagcacgctttcctgatcctcgcgcaaacacatataaaccccttcgcgttctgcgggggtcttgcttctatctaaatacagcaccatgtccggctgcttcaaaattgttttttcttgaaaatgctgtttcataaattgatacgttgtttcatcccgcgccatcagcaacaggccggggtgcgcattataaattttctgtgcccgtttcagctctttgcgcccttttttcgtgtcagaaaaatgagccgttgccggaagctggacaacccgatagtcatggaatgttttaatgatgaagcggcgcgtccactcctcataacggtataaatcccccatatttccgccgccgatgataaagaccatatcctccggatggcgcgagcggatcaggttttttgctgatttgtaaatgtccttcatatcgacctcgacgatgtcaaagtccgggtattcttgctcaagaaatgccttgctggcataagcaattgcgtgatctcccaaattgtcatgggacggcagcagggtcagtatgatttttttctgatgtgctgcggcctttaccggttgatctgccgctcccagccaatattgggacgggtatttgacctttagcagcagccattctgcaaaattgattttcaacgattgtaacgacatgtcctcaccctctgtttctcattttgtactcgatcacccgctgatacatagccgatgccatagcgacgaacggaatcattctgtatttcgccatcagaagcaggcatgaccgttttgcgtcaaaaggagcggtacccgtttttgaaagactttcttgaaacaccgggtccgcgcatatcacgccaacatttctaagcttttcaaacagtcggcggctgccgctcgttttccattcattcagcatgcagatgctgctgtgaagaacgataaaggtatcaagctccttgcgatactcctccagtttgttgttctcctgtaaaaacgccgcattcgcctcatacagcgcaagtcctgattcaaacaattttttctgatagcgctgcacaatggaggaaaggtgaattcggtaatgatagagcggcgtttttacgtaggatactgagcgggcgaaaaaatgagccctgaagctgaaaaactgatcctcgacatgctccagctcgcctcggagcggaaacgacagccgatgggcttcaatcatgcttcttctgtacagtttgttccatgaaaaccctctgaccttcccttcgaataatgccttgatatagtgctccttcggctgatcctgataggtttgggcaatgtctgagtccatggttttgccagtgtcctcaaactctgcggcgtaattgcaaatgaccagatcagtttcatcgcctgctgcccggagcatctgctcgcaataatcaggttcgatccaatcgtctgaatcgataaacgcgataaattcgccgcgtgccgcttcaatgcctttattccgaaccgcaccgagtccctggttttcctgatgaatcaccttgaacctgttgtccattttggcgtattcttctgcgatatccgggctggcgtcagctgaaccgtcattgacaatgatgatttcaatattgtccactgtctggttccgcagtgattcgagacacgttctgatatatgtttctgtgttataaacagcgactaacagactaaccgcaggtgtttccataatgaccggctcctcgtgcataaattaccgggaaaaaatcgttctgtaaggcagaaccgatgaatcaaccggcataagcaaataactgtaaagaaaataacaaacaacgatagcgatatagataagggcgttcgatttttcatcaaatatcctgacaaaataagggactaagatcatttgatacagaccgaaataaatattgaatctggcaaaaatcacgtcctttgtggccaaaaggccgaacaaaaaaccaagcaggcacaaattgacgacaatatcgatttgcggccacagactccgcaatcgttctttatagcaaaatgcaaggaacagcggcagaaccaaaacagcgattttgatcacattcattccatttgtgttcgtcatgagccatttttcataatggctgtatgagctgttttcaagtacaacgacaaacacagaaataaatttttgatataaaaatgtcatgccgagaaataaagcggataggccgaatatcgccggagaccaggcttttcttctgacaataaagtacaccggaatcataatcagcgccgacgaatgaaagagcgagctgacgagcacaatcaggaaatatcgcttccagttcccgctgatgatataacggatcgcccaaaacaaagcagctgccaccatgtattgcctgatgccgttaaaagacgcgtagtaatgaaaggttcccaaaaacaaaaagacactcagctcaaacggcctgccatagtcggcgagtgtcttcataataaagctgtaggtcacgaccgccaccgtaaaatacatgatttgaggatcttccgtgatgaaattcatcagccaaaggagtgcggtaaaccccggatctgtcgctgttttcgctgtgccgaaaccgaatatctgccacacattttgataatcgcccgccaattcgtacagcagcgtgtacgtctgaaaatccgtgccgactcgatagcggagacctgacacgagcacaagtgaagcgagcggaatccagatcaaaagcttattcggccgataccccgtggcaagcgaatcgtcacggccgccgcacattttagcgaaccaagaccaaataaatacaatccccatattgacggcatatacaatcatcggttatggtccttttccgtgctgatgttgtatacattcagcagcgctcctacattttgctgtgcatcgtagccaagttgagcgagtgtttctttgatgaactcacgcttcggcctgcctgcggcggccgcccttgcaatggtttcagcccagacgctgatcggttcagaaagacttaatcttgtgacaagcccgagaccggcgtcgactttttctgtaatgctgcctgaaatgatgcatggaagccccgacgcctgcgcttccacaagcacaaccggcaagccttcgtacagagacggcatgacaaacacatcaaatgtgcgcatcaattcatggatccgttcttcagtgcctaaaaagagaacatctgatagcagattctgccggcgcgcctcctcctctatctccccgcgcaacggcccgtctcccgccagaacgagctgaaagcgaacgcctctttccttgagatgtgcggcaagcttcagcaggaacgcgtggtttttcacttcatgaaaccgggccacatggccgatgatgagccggtcggctgcaatgccgcgtgctgctttttcttcatcagccgcctgcccatttggggcgaacaactcaaggtcaatcccgttaggaagaaggtgaacacgctcccgctccatattggactgtccaaataaaaacctgcccgcatcctctccgcaggcacacagcgctgtcgcatttgccaaaatgagccgcctgaacacgagcagctgcaagcgatccttccagttgaagccggtcttccaagacgtattgtgggaatggcataccctgaccggcactccggcgagccttgccgcaagggcgataaaacccgtttggaaatccgtgtgcgcatgaacggcgctgaacggcccgttttcttttatcgcttttctcacattcctcacaaatgtaaggggattgctttgcccaatgctcgggacataaaaaagacgcccgcctaaagataaaatctcttcatcataagcgcacggatcatttcgatacgttaaaaaatcaaattgcactttgcttttgtccatcttccgatataaattcattaccatggtttccgcgccgcccctgttcatgccactgagaacatggagtacgcgcttttggctgctattcatgcttgacaagcccttccttttggttcatcactctttttttatggtagcgattcatcacggctgcaggcataaacgcgcggattaacggttttgcgatatatatgtaatcagataaaggaagcttcaagcgtctgcacgcctgatagacaaggatggcattgtcaattgaatacgtaaatgaccgccgtttgaatgcatcgctgtcttccctcactttatacaaggcttcctgaagattatagcccctgaagccctcttcaaaaaagcgaagccacaaatcaatatcttccattcgtctcgtccgccgcaccgaccggtagcctttcagcgtgcggtaggcactcgctctcatcataatcgtgccatggcaaaatggggtcccttttgccatgatgcccggctccggaacagaaggcagaatgcgggcgcctcttacgccaaattcatcaaacacaagcatgccggtgccaaccacctgataatgtcggtgcttttctaaaaacgcgacctgcttttccagacggcgcggaaacgaaaggtcatctccatcctgacgtgcgatataatcgcctgtcgcatgcgaaagacaatgatttaatgatgcggcaagccgcttatttgttttgttttgaatcagtttgatgcggtcgctgtaatgagcggcatactgcttcgcgatgcggagcgtgccgtctgttgacgcatcatcgcacaaaatcagctcccaatttttataggattggctgagtatggattctatgctttctgccaaagtgcgttcgcaattataaatgcccataatgacagaaactttcggtcctgagttcatacgcttttctcctttgtatccatatccatgtacgcggaataaatatctgccatttcttccaccgttcgcgcctccgagaagcgcaaggctgtttttcggccttcctgtcccagctttcggcagagctccggcttatggtaaagctgttcaatccggcgggcaaaagcagcactgtcaccgattttgaccagaaaaccgttttctccgtcgcgaatgatttcccgatgcccgcgattatctgtggcgatcgccggtttttctgccgccattccctcaagcacattcataccgaggccttctctaatgctggatgcgacagatacatccgcaagctgaatcaactcatgtatgtcgctgcaaaagccgtaaaaacagacattggcggaggcaccaagcttttcagctaacgtttgatacgtatgttccattgccccttccccggcaaacacaaggcggagtgagggaattttttcttttagcaaggctgcggcttcaattaactgcttctggtttttgttcagattgagctcagccggataaaccaatataaaatcatcttcacggaacccgtgcttttctctgagtctttgctgctctatcggactgacaggccggaaacgctcggtgttgacgccaatgccgtgaattttctgcgtccttccgcccggcctttgaagtcctttcgcccgtatgtaatcctcttcattaatcgtaatcaggcagtctgtatatgctgaaagccatttctcaaccggatagtaaagaagccaatttttcatcggtgcccctttgcagaagtgaaatccgtgtgctgtgtacagcacctttgttccgtgccgccgtgcctgcctcgccgccagtctggcgagaacgccgccgaccggtgtatggcaatggacaatgtcgtattcataggtgtcaatcactttcttcagctgcctataaacggccaggttctgagggtcaaaaggtgacctgcgaatcgggatggagaatttctcatccacatacggcagcttggtttgtccgttcgcagcgacatgaacctcccagcccatttgtttgaaccatttaaaataagggaggtgaaaggccttaaaatgataatcaacagtcgcgcaaaacaatatctttttcgtcattttcactccccctaatgaacgctggcagccgtcatttcttctgatgtattgattgccgcaaacagcctcgctctcaggtcggcttccggcagctcatgaaaatcctcgataaagcgcatcagcaccggccaatcgccgtccaccgctttaccgatgtgaatttttggaaagatttgttcagcatggacttcatttttgttcagcaattcttcatacattttttcgcccggacgaatgcctgtgaattcgattggaacctgctcagtcgtgtagccggacaaatgaatgaggtttttggcaagatccacaatctttacgggctctcccatatcgagaacgaaaatctgacgccctttcgccagtgccccagcctgaatcacaagccttgatgcctcgggaatcgtcatgaaatagcgggtcattgccggatgtgttactgtcaccggaccgcctttttcaatctgttttttgaaaattggaatgacgctgccgcggctcccgagtacattgccgaagcgaacagcgacaaatttggttctgctgactttcccaagattcataataatcatctctgcgaatcgttttgtcgcccccattacgttggctgggttcaccgctttgtccgatgaaatcagcacgaatgtctctgttcccgacatatcggctgcttccgcgacattttttgttccgataatattgtttttgaccgcctcttctggattgtgttccattaaaggcacatgcttatgggcagctgcatgatagacaacatgcggctcgtattttttcatcaaggtaaacattttatcgcggtcctgcacatcagcgatttccgtatggaacacaatgtgtttgccgaatcgtccgttcagctctgtataaatcgaatgaatgctgttttccccatggccgagcagaatgatttccttaggctgaaacgcgctgatctgacgacagatttccgagccgattgatccgcccgctcccgtgacgagaactgtttttcctttgatgcggttcgaaatttcgctagtgtcgagggttaccggctttctgccgagcaagtcctcagcttttacatctctgatttgtccggcagttcgtgtgccaagcagcatttcatcaaaatgaggcataattttaatgtttactccggttcgcacacattctttatataacacctgaagctcatgggtgcggagtgaaggaatggcaataataatataattaattttgagcttttgcaccgcaggcatgatactttcttttccgccgattacgggcagccccataatttctaatttatgcttcgtttggtcgtcatcaataaaagcgacaggtatgatatcaggttcatctttcgaaagcagctgcctgaccatcagagtcccacctgagcccgccccgataatcagcgcgcgggacgaggcgcagcgttttttcctgatgctttcgtttaatactctggataaaatacgggtccctccaatagacaaaagctgaagcacccagcacgcggttaacagacggaagaacatcgtgtgatacacagcatactgaatgacgccggtcacagcggctgaaagcgtaatgcccttaagcaggacaatcagctcgccaagcccggtgtatgtccacacctgtttatactgattgaacaggaaagcacacacatgatagctgagaagcaagctgacagcagtaagcagtaatgctccggagtcataaaattgataggaatcttttaaaaattgatatcctgcaataactgaatttaaaacgaggtaagtatccagcgcaataatcattgacagtcttctccggtaactcaaccttttcccccctaattcttttatcggtttagctgcggcggttttcgtctctccaaaaaatcggcagcagctaaaccgacaacacgtcctatgtatatatcagataagtgggcatttaacccatcctcacgccccgccagcgacgaccagcatctaaggcagcaacttcagctgcccacagcagagccgagtgcctccattgatacaggtcaggagacatcacctttacaaaaactagtaggaatagtgttccgattttttcattttctttttgtttaaaagagcgcctaacagcttcgcattggattgttccagtgcatcctttgctttcagaacggtatcggtttttgtttttccgcttaaaacgacgagcacgctgccgtctgtctgatttgctagaatctgagcatctgcaacagccaaaagaggaggggaatcaaagatgacgaggctgaattgttcatagatctcagatattaaatctcccattgcttttgaagacaacagttctgccgggtttggcggggtcggcccgcttgtcagtacatataagttatcgatcggcgtcttttgcaccgtctcactgagtgaagcattgccgaccagcacatttgtcagcccggttacattatcaacctgaaacgtctgattgatggtcggctttcttaaatcggcatccaccagcagtactttcttttcctgctgctgcgcaaagacagccgcaagattcgctgcactgaacgatttaccttcaccaggcacagaggaggtgacgaggatagatcgcaagttggtctggacagatgagaactcaatgtttgtccgaatggtgcgatattgttccgcaacaactgatttattgtgtaaaacagatatttgagccaaacctcgccttgctttcttttttctaaagatcactcgcttcactccccgaaatgttttatcccacgattccgccctttgtggacatcaggaacggagcctaagcatggcaatccggttctctcgctgagctgccgtgcgcttttgcaagtatcatcgagaaaatgcagaaaaaatgccagtgtaatgccgcccatgacagcagcgccaaaagccatgaccatatttcgcagcctggccggcttgatcatcgggctttcagaagccttcgcctctgataatatatgtacgccttgtacattcattctttcatctacttctttttcaaacttgttcactaacgtgttcgcaatctcagccgctttcgccgggtcgtgatcctggacggcaacgttgataatttctgattcattttcactgctggtaaccacttttcctttcagcgaggaagccgattcagataggtgcaattccgccttaacttcttccatcaaggcagtgcttttcataatcgattggaacgtgctgctatactgaagatttcgctggatgtcactgagattcgagttttcttcaccgtctgattcatgaaccagcacctgtgtcgacgcctggtaggtcggtgaaatgaccttaaattgcacaaaacccataataagggtgacgccgattgtgatgagcagaatcagcacgaatctgtgtctgacaatcgcatataattctttgaaactcatattctcattcatgtattcatagccttcagccttcccgcggctggcttcccgcgcccctttctgttaatgattggattataaaagaaaacgttattatttaaaaattgcaaaataagccaataagttctctttagagaacaaaatcatgattttcctctaatttactgcacttcccttattattttaaattttataaagaacgaaaaattctttataatgaacaaaataacgacaggaatagaggagaatttcatattatgattggaagaattatccgtttgtaccgtaaaagaaaaggctattctattaatcagctggctgttgagtcaggcgtatccaaatcctatttaagcaagattgaaagaggcgttcacacgaatccgtccgttcaatttttaaaaaaagtttctgccacactggaagttgaattaacagaattatttgacgcagaaacaatgatgtatgaaaaaatcagcggcggtgaagaagaatggcgcgtacatttagtgcaagccgtacaagccgggatggaaaaggaagaattgttcacttttacgaacaggctaaagaaagaacagcctgaaactgcctcttaccgcaaccgcaaactgacggaatccaatatagaagaatggaaagcgctgatggcggaagcaagagaaatcggtctgactgtccatgaagtcaaatcctttttaaaaacaatgggaagatgatgatcggttaagggctaacgttcgcatctatagggtaaatctgtttataatgggggaaaaagggagagaacacaatgactcatcaaatagtaacgactcaatacggcaaagtaaaaggcacaacggaaaacggcgtacataagtggaaaggcatcccctatgccaagccgcctgtcggacaatggcgttttaaagcacctgagccgcctgaagtgtgggaagatgtccttgatgccacagcgtacggccctgtttgcccgcagccgtctgatttgctgtcactttcgtatactgagctgccccgccagtccgaggattgcttgtttgtcaatgtatttgcgcctgacactccaagccaaaacctgcctgtcatggtttggattcacggaggcgctttttatctcggcgcgggcagtgagccattgtatgacggatcaaaacttgcggcgcagggagaggtcattgtcgttacactgaactatcggctggggccgtttggctttttgcacttgtcttcgtttgatgaggcgtattccgataaccttgggcttttagaccaagtcgccgcactgaaatgggtgcgggagaatatttcagcgtttggcggtgatcccgataacgtaacagtatttggagaatccgccggcgggatgagcattgccgcgcttctcgctatgcctgcggcaaaaggcctgttccagaaagcaatcatggaaagcggcgcttctcgaacgatgacgaaagaacaagcggcgagcacctcggcagcctttttacaggtccttgggattaacgagggccaattggataaattgcatacggtttctgcggaagatttgctaaaagcggccgatcagcttcggatcgcagaaaaagaaaatatctttcagctgttcttccagcccgcccttgatccaaaaacgctgcctgctgaaccagaaaaagcgatcgcagaaggggccgcttccggcattccgctattaatcggaacaacccgtgatgaaggatatttatttttcaccccggattcagacgttcattctcaggaaacgcttgatgcagcgctcgagtatttactagggaagccgctggcagagaaagctgccgatttgtatccgcgttctctggaaagccaaattcatatgatgactgatttgttattttggcgccccgctgtcgcctatgcatccgcacattcccattatgcccctgtctggatgtaccggttcgattggcacccggagaagccgccgtacaataaagcgtttcacgcattagagcttccttttgtctttggaaatctggacggattagaacgaatggcaaaagcggaggttacggatgaggtgaaacagctttctcactcgatacaatcagcatggatcacattcgccaaaacaggaaacccaagcaccgaagctgtgaattggccggcgtatcatgaagaaacgagagagacgctgattttagactcagagattacgatcgaaaacgatcccgaatctgaaaaaaggcagaagctattcccttcaaaaggagaataaatatggggaaaacaggatacattggtgctgccattgttgtggcagcttgtatcattattttgtcggccgtggtatgtttacgggacacagtctattaccagcctatgcgctggactggcatcatactgtttttcgtgggaattgtgatggttcccgcatactcagcaaaaagaaaacccggaaaagagaagtaattctcttttccgggtttttatgtttattataatcttcccgcgcgaatatcgtctgtcattccctcataaggagccttcgaaatcacttcttcgttgtcgactccttcatttttcagaaatgtaatttccgcaaattcaggtacaacgtattttggatacgtttcatatttttcgcgggattcttccatcaaatcaatgtggtcattttggtagcaaaccgtaatttcaggatgttcatgcacccatttcgggaagaaaataatgccgtgcatgcgtttttcatttggcataaagtttaatgaaacatccgtgccagtcggctctgtccaagacactttatatacgccttctgtcagtttgacaatattcacttcctgatcccgaacccagcgtccggcaaccattccgctatgaattctataatcaattgtatggtcatttttaatataaatctcgtattcccagccgttttcatacgtataaatcatgtggcttccgataaagttttccatttttcacactctccttagtcttttactgcacttcataaatgtctagtcgaacgtaatcaggggttctttctgcggaaccgataaacaagcggtcatggagccattgatagactttactgcctgtttcaaacgtcggtaccgtacgaaaataaacatgctccggatcaatgatttccccggctgccgcttgttttcgaaacggctcgctgacttgccgtattccattgttttcaatgtaaatcagttcatgatctgctgtttcgatcacatacctggcagataaatcgtttctgccgtcagcgcgaatcatttgcgaatcggcaccgctcggcaaaatacgtccctttacttccccggttattgttcccgaacgaatcggaatgaatcgtctcagtcccaggcctgtctcaccaatcgtgataggcggatcaaccttgatttctaaagaggcgaatggttttaaaaccggcttcttcacgagaaccacctcacctccagaaaaaatcatgtaactatttacatgtttaatttaacactattgcagttaactgtcaaacaataggaacataaaaaaacaaggactgtttgaagacagtccttgtctgaagctagctttgataagcaagatatgtgctgacagtgcttttggcaagacaggcagaggaatctataatcggaatctcactttgaatatgatctaacaccgcatttaaatccgtgcaggctgaaatgatgatgtctgcatgctgactgatttcttcatatagcgtctgccacaatgcttgtgtatgctgcatatgatttggctgtttgattgcggcgataagctggttcacagcctgctgccaatggtccttgtgaacaacttcttgtccatttgccttcagaactttttggtagatggcggattggatggttggctctgttcctaaaaccaccgctttttttgcaggatgcggaatctcttttatcgtttcctcaacgatatgcaacataggaaccgacaatgcctgctgaatctcttcatagtagacatgcgccgtattacaaggcagcgcaatgaaatccactcctgttttctcgagctttaccgctccgtcgataatcgcttttttcatctcgtcatggtcaattggacgatctgcatagaagggcgtcgggcatgaatagatcatcatgtgcgggtagtcaatatcgtttgaagccccatacagcttctgacagtaatcaatcaccttatcaataaacggcgaggtcgatttcggccccattccggctaatattccgatcatcaaattcattcctttctaatttgtacggaccgcttcttcttctgagccatcctcatagaggataaagcttttcgcagcatccccgcctaacataaactcgacttcaacagacaatgctcgcagaaagaaacgggtttccgaggaaggaaataactccagtctcagctgtccggtgatctccaaataaagccgttcattctcggctgtcacctgtgcagccgttccatcctgcaacaggtagctgccaacatagcggctgtatatcgccgtatcaattgcttttttctttttatcagcaggacgttccgggacctcatatggctggccaaatagaatatgttccgccgccttcagaatcgcttgttcatattcagtatcctcttccttattactcaaatagatcagtgttttacgatgatcgatatatcggatcatcaacgtcgaatagccgggccatcctccgctgtggctgacaatccgccctttttcaggactattttgcagtacccagccaaagccataatcaattgtttctccattgttgaggcgcactggagaaaacgcagattccttagaagccttgctgatgaaatcgtcctgatataaagcctgatcaaatcgaaacaaatcgcttgtgacagagttcaccgtcccatctccctgtatgccatcgagatacacaacatagttcgtttcctccagctcatcagggaggacgtatgtttcggaatgtacatcatacacatatccatatgcataatgatcaattcgctcaggcgaaagcctcctgttatacactcttgtttcattcatgccgatcggtgaaaaaatacttgttttcataaaatccgcatagctcatgccagatgctttttcaatgataaccgccagcagcacataccccgtattgctgtacatccagccttcattcggttcaaaataaccagatagcccctcattcatcagcatatcgacaatatcctgattcaccgcaatcttgtgtgaatcccaattggcaaaaaaccatcccatataatcaggaagccctgacgtatggttcaataaatgccgaatcgttacgccctgatacggaaaaccgggcagccagcgatccactttatcctcatagccaagaatccccttctcctccagcaagatgattcccaatgctgtaaaaggctttgacaaagacgctaactcaaacaaagagttggttttcaacgggcgtttttccgtcatttccgcatagccaaaagagtggtgatataaaatatcgccaccctccgcagccagaaccgtcccgttaaactgatgtttttcgcctaatgtctcaaataatgtctgaagatgctttcttttattctgtttcattcctccacctcccatatctctgtacgttactaacctactaacgtttcaaatattttgaaaaacccttcagttagagatcctttttaacccatcacatatacctgcggttcactactatttagtgaaatgagatattatgatattttctgaattatgattaaaaaggcaactttatgcccatgcaacagaagctataaaaaatacagagaatgaaaagaaacagatagattttttagttctttaggcccgtagaccgcaaatccttttatgattttctatcaaacaaaagaggaaaatagaccagttgcaatccaaacgagagtctaatagaatgaggtcgaaaagtaaatcgcgcgggtttgttactgataaagcaggcaagacctaaaatgtgtaaagggcaaagtgtatactttggcgtcaccccttacatattttaggtctttttttattgtgcgtaactaacttgccatcttcaaacaggagggctggaagaagcagaccgctaacacagtacataaaaaaggagacatgaacgatgaacatcaaaaagtttgcaaaacaagcaacagtattaacctttactaccgcactgctggcaggaggcgcaactcaagcgtttgcgaaagaaacgaaccaaaagccatataaggaaacatacggcatttcccatattacacgccatgatatgctgcaaatccctgaacagcaaaaaaatgaaaaatatcaagttcctgaattcgattcgtccacaattaaaaatatctcttctgcaaaaggcctggacgtttgggacagctggccattacaaaacgctgacggcactgtcgcaaactatcatggctaccacatcgtctttgcattagccggagatcctaaaaatgcggatgacacatcgatttacatgttctatcaaaaagtcggcgaaacttctattgacagctggaaaaacgctggccgcgtctttaaagacagcgacaaattcgatgcaaatgattctatcctaaaagaccaaacgcaagaatggtcaggttcagccacatttacatctgacggaaaaatccgtttattctacactgatttctccggtaaacattacggcaaacaaacactgacaactgcacaggttaacgtatcagcatcagacagctctctgaacatcaacggtgtagaggattataaatcaatctttgacggtgacggcaaaacgtatcaaaatgtacagcagttcatcgatgaaggcaactacagctcaggcgacaaccatacgctgagagatcctcactacgtagaagataaaggccacaaatacttagtatttgaagcaaacactggaactgaagatggctaccaaggcgaagaatctttatttaacaaagcatactatggcaaaagcacatcattcttccgtcaagaaagtcaaaagcttctgcaaagtgataaaaagcgcactgctgaattagctaacggcgctctcggtatgattgagctaaacgatgattacacactgaaaaaagtgatgaaaccgctgattgcatctaacacagtaacagatgaaattgaacgcgcgaacgtctttaaaatgaacggcaaatggtatctgttcactgactcccgcgggtcaaaaatgacgattgacggcattacgtctaacgatatttacatgcttggctatgtttctaattctttaactggcccatacaagccgctgaacaaaactggccttgtgttaaaaatggatcttgatcctaacgatgtaacctttacttactcacacttcgctgtacctcaagcgaaaggaaacaatgtcgtgattacaagctatatgacaaacagaggattctacgcagacaaacaatcaacgtttgcgccaagcttcctgctgaacatcaaaggcaagaaaacatctgttgtcaaagacagcatccttgaacaaggacaattaacagttaacaaataaaaacgcaaaagaaaatgccgatatcctattggcattttcttttatttcttatcaacataaaggtgaatcccatatgaactatataaaagcaggcaaatggctaaccgtattcctaacctttttaggaatattgctgtttatcgacttatttccaaaagaagaacatgaccaaaaaacaaaatcaaaacagaagccggactaccgggctgcatatcattttacgacgccggataaatggaaaaatgaccctcaaaaaccgatctattttgatggcaagtatcattatttctatctatataaccgggattacccaaaaggcaacggcacagaatggcgccatgccgtctcagaggatttggtgcactggaccgatgaaggcgtggcgattccgaaatatacaaacccggacggtgacatttggaccggttccgtcgtggttgataaagagaacacagccggctttgggaaaaatgcgcttgtcgcgattgtgacacagccctcagccaaagacaaaaaacaggaacaatatttgtggtacagcacagataagggaaaatcattcaaattctacagtggcaaccccgttatgcctaatccgggtacagacgatttcagagatccgaaagtcatatgggatgaccaggataacaaatgggtcatggtcatggctgaaggatcaaaaatcggcttttatgaatccgataatcttaaggactggcattacacaagcggattcttcccagaacaggcgggaatggtggaatgtcccgacctctacatgatgcgggcaagcgacggaacgaataagtgggttctcggtgccagcgcgaatggcaaaccgtggggcaaaccaaatacgtacgcctactggaccggaagcttcgacggaaaagaattcaaagcggatcagactgaagcccaatggcttgactatggcttcgactggtatggcggtgtgacgttcgaagacagcaaaagcacagatccattagaaaagcggtatgcgcttgcctggatgaacaattgggattatgccaacaacaccccgacaatgaagaacggctttaacggcacagattctgtcatacgcgaactccggctgaaggagcaggatggaacatacagcctcgtctcacagccgattgaagctttggagcagctgactgtttcaactgacgaaatagaggatcaggatgtgaacggatcaaaaacattgtcgataacaggtgatacgtaccagcttgatacggatctttcttggtcagagctaaagaatgcaggcgtcaggctcagagaatcagaagaccaaaaacgccatattgatgtcggtattttcgctgaaggcggctatgcttatgtcaatagagcagccacaaatcagcctgacaaaagcaatacctatgtcgaaagcaaagctccttatgatgtaaacaaacgtaaggtgcatttgaaaatacttgtcgataaaacaacgatagaagtatttgttggcgacgggaaaaccgttttttcaaatgaagtcttcccaaagcctgaagataaaggaattaccctttattctgacggcggcacagcctccttcaaaaatataacagtgaaacactttgattcgattcatgaataaaaacaggggcagcgcaggctgccctgtttttttattaggagcggtattctctgttacatattgggcattgtaagaaatataaggctggtttcaaaggaggaagcgaatgtctaaacaaggaaattttcaaaaatcaatgtcgctgtttgatctgattttgattgggatgggagccatctttggatcagcgtggctgttcgctgtcagtaatgtcgcttcaaaagcagggccctccggcgctttttcctggatcctcggaggagccattattttgttaatcgggctcgtatatgcggagctcggagccgctctgccccgtaccggaggcatcattcgataccccgtttattcacatggccaccttgtcggctacttaatttcgtttgtcacgattgtcgcttatacaagcttgatttcaattgaagtgacagctgtgcgccagtatgtggcctattggtttcccggcctgaccattaaagggtctgattcgccgaccatttccggctggatcttgcagtttgccctattatgcttgtttttcctgctgaattattggagcgtcaaaaccttcgctaaggcgaatttcatcatatcgatttttaaatatattgtgccgattaccatcattattgtgctgatctttcattttcagccggagaatttatccgttcaaggatttgcaccgtttggatttacaggtattcaggctgcaatctcgacaggcggcgtcatgtttgcgtatctcggcctgcacccgattgtatctgtagcaggtgaagtccaaaatccaaaacgcaatatcccgatcgctttaatcatttgcatcatcgtttcaaccatcatttatactgttttgcaggtcacctttattggtgcaatcccgacagaaacactgaaacatggctggcccgcaattggccgggagttctcattgccgtttaaggatattgcggtcatgctcggattaggctggcttgcaacgcttgtcattttagacgccattctgtctcccggaggaaacgggaatatctttatgaatacgacatcccgccttgtttacgcctgggcgcgtaacggcacattatttggcatattctcaaaggtcaataaagatacggggacaccccgcgcatcgctttggctttcgtttgccctgtccattttctggacacttccctttccttcgtggaatgcgctcgtcaatgtctgttcagtcgcgctcattctttcatatgcgattgcacccatttcttcagctgcgctgagggtcaacgcgaaggacttaaacaggccgttttatttaaagggaatgagcattatcgggccgctttcctttatatttacagcgtttatcgtgtactggtcaggatggaaaacagtctcctggctgctcggttcacaactcgtgatgtttttgatctatctctgtttcagcaaatatacgcctaaagaagatgtcagcctcgctcagcagctgaaatcagcctggtggcttatcgggttttatattatgatgctgatcttttcctacatcggttctttcggacatggtttagggattatcagcaatcccgtcgacctcattttagtcgcgatcggctcacttgcgatttattactgggcaaagtataccgggctcccaaaagccgccattgattacgataaataaagaagcaagaggttttcttgcttctttattctttacaaacatacatacacgcgataaaatgaatgagagtcagtcattatcggaggtgttcctcatgccaaaacaaacatcgggcaaatacgaaaaaattctgcaggctgccatagaagtcatttctgaaaaaggcctcgacaaagcttctatttctgatattgtcaaaaaggccggcactgcccaaggaacattctatttgtatttttcatctaaaaatgccctcataccggccattgcagaaaatctcctcacccatacacttgatcaaatcaaaggtaggctgcatggggacgaggatttttggaccgttttagatatattaattgatgagacatttctcattacagaacgccataaggatattattgtcctctgttattccgggcttgcgatcgaccactccatggaaaaatgggagacgatctatcagccttattattcctggcttgaaaaaatcatcaacaaggccattgcaaaccacgaggtaacggaaggaatcaattcaaaatggacggccagaacgattatcaacttggtcgagaatactgcggaacgattctatatcggatttgaacaagatgaaaatgttgaagtgtataaaaaggaaattttcactttcttaaaacggagcttaggtactgcttaaaaaatgactgggtaacaccgctcattttttaatgccctaaaaatgactgacgttcattcataaaatagagaggtgtttcatttgaattgggttcttgtttttattgcagggcttttagaagttgtttgggcctcttccctcaaacatgccgattcgcttttggattggatcatcatttttatcttaatcgcggtcagctttatcctgttgatccgctcttatcaaaaaatcccgatggccgcggcgtacactgtgtttgtgggaatcggaaccgtcggaacatatctgactggaattgttctgggcgaatccttctcagcagcccaaatgttctttttagctttattgctggctggcattttaggaatgaaattatttacgaaagaaagcaaatctcagccgggaggtgaacaataatggcatggtttttattagtgattgccggcatagaagaaattatagctgccattgccatgaaatatatagacggaacaagaaaaaaatggccaatcattgtgatgactgttggattcggcttatccttttactgcctttcccaagcgatgatcgtcctgcctgccggagtcgcatatgccgtctggactggcattggaagcattggtgtttcggcggtcgggctcatctggtttaaggagcggtttcagctttcacaggtgatttcactttgccttatcctagccggcgtcatcggcctgcgtcttacgtcatcttcataaaatcaaggcatatacagctgtatatgcctttgccattaagcttcgtgatgtttttgaagatgaagcggcggtgggatgagccagcctttgttttttagcagccttaagtattttgcgccggttgccgctttcgacatatgaaattgcccaaacatcatggcaatatcctcacgaatcgattgccccatcattttgctgcatgtcaccagacctgcagcattttctgctgccgcggaggccgccacatccggatcgagaaaccgtgcgccaggcggaatgtcgttaagatctgctgtcggcggttcaggagaagccggcggcagcgccaccccgttttctttcaggatcgtgctgacctgtttgatttcatcttggcatttctcaatagactcacgaagcagtttcttcaggtcgtcatcaccgacatgattcaatagcatttggtaattgccgaccattttattgcccgccatcacataactccacaagccgaatacctcaccgtaatgcatcggttcatcctgcggatttccgcttaaaatacccatgttcatcctcctcccatattcaatattgcacatttcataacgtgcccaagcggaggaacatttatgtttcagcggaaaagatttatgaaatgaaacaaaacaaaaaagacaagagtggcaagttgccaaaccattgtctttcctgttgtttgattggacgcactgaagggattcgcaccccgacagacaagataccggaaaccattcaagtgctttttaatatgagtcattgattctgtctttaataaactttaacgagatggcgggatgctttgcggaaaacgaaatacattttcggggtcatatttcgcctttatttctcgaagccgcgcaaagtttgcgccataatattcttttccgaagttttcaatgttttgatctggaacattaacatatgaacctgctacatatggttgcatcagctgacgcactctttcaactgatgcaagatttgaatcttcttgtgatttatttttccaactagccgtccattccgtataaaatattggatggcgccaaaaaaaggcagtttcgtctttagggactctgcttatagcaccaccccaattgataaaaaagaaattggcatctgttccagtagcgtcttccaaaaattttctcatgattgaaatgggttcgtcagaccaaaaatcatgaccccaagccgaggagaatttaacactctgatcatttctgccagggatgggttcgtcagggtctaagaaatctatagcatctggatagtataatgttttgatatctgcttctgttggagttcccgcatgtaataaaggttttaataatcgaatcaattcagttttcgaaccgaggaaaattccttctgcatgacacaaaccatttattttgctgtaaatttcaaggtagcatcctaatcgttcatctacaaacggagcccatttctgccaagctttaaataccgtttctaattgttcccacggccagataatattgaagacggttgcagttttaggggcacgatgaactttgaatgtatattgggtattatatccaaagttacctcctcctccgcctctagaagcccatagcaaatcctcattgtgagattgatctgcatgaataatccttccttttgcatctaccgttttcagcgcgagaaggttatcacttataaggccaatcgatcgtgagagtacaccaaatccgccgcccatcgtaattcccccgattccaactgttgggctatctccaaacggagccataaaaccgtctcgagctaatccctttacaagcgggccaacgggaataccagtttgaacggttgcaatcgcgttttcttcatctaagaaaactttattcatgtcactcacatcaataacaattcctccacttactactgaaaggttcttatctaaagcatggcgaccgcttctgacacgtaagggcactttattctcacgagcccatttaatggcattacttacatcgtatgaattttgcgcaaaaacaaagacaagaggatagacatccacataagggttccaattcttaatagcctctgtatagccggggtctcctttgaaaattacacgccctgtcaactgtgttgatcccatatattatttcactcctaaagaaattcgattcagatactaaaatatgcaggagctggataatcgcatagacaaatgatctacgaactataaatataatacgctaaggcctttttcgtcggtaaggtctgctgagaaacatttttcaaacaattttgagcaaacttcctgtccaatcctccaacaagcgttttttcttatcgtttttaggagcagtgtccagtttttttcggagtgaatattcgtttaggccaaaagaaaagagagatgaagaagtgtttagtaccagaggtatacatccatacaacagactctagatcatcatatactgaatgtatgtagaaaggagacatcagctttggcaaaatatcggattatgacctttgacggcggcggtaccttaggtgctttaagtttgcaactgttaaacagattggctaggcaaaacccgaagttaattagtcgaacccatgtattttcgggaaattcaatcggttcatttactgcccttgcattagcaagcggaagatctccgagggaaacacttcagtattttgaggatgaaatcctacccgcattcagcatttcccggccaggcggacctgttttcaaccaacaattaccctattccggttttattaaagcggtaagaaattttttcccagcagatcttcaacttatagatttaagaaaacgaattgttgtcccatcattcaaattatactctcaaaaactggatcgttggactcctgtcttatttcacaattttcccggctctccctatttaaatgagaaagtaagtgatgtcatactgcggagcagcggtgctcccgcgacgcaacgggcctatcaaaactatgtggatgggtatgtagtagcaacgaaccctagtacagccagtatcgcgtttgcagttggtaaagccaatgtgccattggatcaaattgcggtattgtccatcggaacaggtgaagccccgacccggttaagaagagatacgaagggatggggaatggtaagtgcagataacatccgccccgaaaatctgaagaaccttcctccaaattggggagttcttttggacaggtcgcctaatgaacctttactgccatttcttcagatgattgctggcggtaatgggtactatgaatccatggtcagtgcgaatcttctgggagatcgttttttccggttagatccacggattccgaacttctccaaaacggaccctgccgtcgttcccgctgtcattgaaattgcgaacaaaaccaacttacagcctgcgattcaatttatagagaagaactgggggagtaaataaatttttattttaaaactattctcacttatccaattttgtccgagagaagattctcaaaataaatacaggcaatgggtagaaccggatttttttaaaggtttgttaatcacaagctaataagatgaatgaaaaaatcaattcatacttcttcttttgaaagtgagggttcaaactaaagaatgtaattgaaatgttactctaaggtatgcaattccctttttcacacaaaaaagacaagagcggcaaatcgccaaacccttgtctttcctgttgttctattggacgcgctcggagggattcgaacccccgacagacgtggtaccggaaaccaccgctctatccaactgagctacgagcgcagaatgactgcgttatgagaacgtcagcacaactaattatacgataattccattcaaataacaaccctctatttcgagaggccgttttttaaatagacaaagcatcttaattggcaatctgacatacgatggtttgaacccctgtatttttggggaaaatgggaaaaagagacgactttgcatatcaggccagctttttgtttgacctttattgaccaaaaatgtatcatgtaactacatacttacctaaaaggtgaaggaggagcattatgaatttaatacctacagtcattgaacaaacgaaccgcggggaaagagcgtatgacatttattctcgtctattaaaggatcgtatcatcatgcttggatctgcgattgatgacaacgttgcgaactccatcgtgtcacagcttttattcttagcagcagaagaccctgaaaaagaaatttctctttacatcaacagcccgggcggctctattacagccggtatggcgatctatgataccatgcagtttattaagccgaaggtatctacaatttgtatcggtatggctgcgtcaatgggcgcgttcctgcttgcagccggcgaaaaaggcaaacgctatgcgcttccaaacagtgaagtcatgattcaccagcctcttggcggtgcgcaaggtcaggcgacagaaattgaaattgccgcgaaacgcattctcttgcttcgcgacaaattaaacaaagtccttgctgaacgtactggccagccgcttgaagtgatcgaacgcgacacagaccgtgataacttcaagtctgctgaagaagcgcttgaatacggcctgattgacaaaattttgactcacacagaagacaaaaagtaataacacaacctgcaagagctgcgtctcttgcaggtttttttcatttcaaggaattgactcccttaaacactttttgttctatactgctcccatccctcatgtaacagctcaagcgtcaaatcattcgtctgcctcacaaccagatcagcaccaagcatcggctgtccttgaccgacaccaaccgcaaacatccccgcagatttgattgcagaaatgcctgcttctgcgtcttctattgccgcgcaatcagcaggggaaacatcgagcatcgctgcagctgttaaaaagatgtcaggatcaggcttccccttcgcaagagtcgtcggatcaacaatggcatcaaaatcatcgataattgccaaacgtcttaaaatcttaggagcattgcgacttgaagatgctaacccgatttttatattttcgtttttcaattgacatagaagcctgccaatccccggtaaaagatcttccggcgtcaatttgctgatcagcatttgataatcgcgatttttccgatgcataagctcttgtttctccgcatttgtatactttgtttccgcaccgccaaagatcaatatgctttcaagtgactcttctctgctgattccttttagcctttcattcatgtctctgtcaaaagggatattaatttgttctgcgatgtgcttccaagcgagaaaatgatattcagcagtatctgttatcactccgtctaaatcaaaaatgaccgctttcatatactaatgcccatcacagcttcataaggtttgaggctaatactctttaagtccgcccgctcctgcggatagtttgaaatcagcactttccaacgctcatgaatcagttctggaggcgcttcgaacagagccttttcttccgataaattcacaacgacaagaagcttttccccttgatattctcgaaggtaagaaaagacctgcggatcattctcctgcaaaagctgataatcgccatatatcataatcttatattgctttcgtaattgaatgagcttctgatagtaaaagaaaatcgaatcttgatctttcaaggactctttcacattgatatcttggtagcgggaatttaccggtatccacgggtttccggttgtgaatcccgcatgttttccggcatcccactgcataggtgttctcgcatgatcccttccttttatcatcacggctttgagaaactctttttctgacatcgttttgttttcgacgactagttcacgatatgcattctttatttcaagatcatcatacatctccagcggcatatcgctgttgaccatgccgatttcttctccctggtaaataaacggcgttcctttcatgccgtgcagaaccgttgcaaatgccttcgcacattctttacgcagcttcccatcattgccccagcgggaaataaccctcggctggtcatggttctcaaaatacagggtattccagccgacattcattaacccggtctgccaccttgtcatcgtcttttttaaagcaatcaaatcaaacggcttgatctgccatttcccatttggcgagttttgttctgtatcaatatccatatgttcaaatgtaaagatcatattcagctcttgcctgcttgcatctgtgtactttttcgcctcttcaatatcagagccgtttgcctctccgactgtcatgcagtcgtaatgagaaagcacttccctgttcatctcttgaataaactcatgaagacgggggccgttagagtgataacggccgacaatatagctgcggctgtgatccgtttcgtagtccggaaaatcggtgtatttagaaatagagccgatcacatccatccgccagccgtcaacgcctctatccatccagaatctcattacatcataaacttcccggcgaacggcttcgttttcccaatttaaatcaggctgttttttcgaaaagtagtgcaaataatactgctctgttccttcatcgtatgtccacgctgagcctgaaaagatcgatccccaattattcggctctgagccgtccggtttaggatctttccaaaaataataatcccggtaaggattgtccttcgacttgcggctttcagcaaaccaagcatgctcatctgatgtgtggttcacgaccaaatccatgacgattttcattccgcgtttatgggcttcatcaatcagctgaaacatatcttcatttgtcccaaacttttcgtacatgtttttgtaatcgctgatatcatatccgttgtcatcctgcggggaatcaaataccggggagagccagatgacatccgccccgagatttttgatgtaatccagcttttgaatcacaccttgcaaatccccgaatccatctccattggcatcataaaaactgcgcgggtaaatttgataaacgacagcttctttccaccattcactcattaggcgttctcctttcacatcgtccctgtaggacaactggttcctcataaacgttcatgtgcagcggctcgccttttacaagctcaaaaataacgcgcttttcgtcaaccgtcacattgattaatcgatttcgataattgatgttgaatgaatattcgtcccattctttcggcaaaaacggagcaaatgacagcgtctcattcgcggtgcgcatgcctgcaaagccatgaacgattgccagccagctacccgtcattgaagtaatatgcaagccttcttccgtatcatgattgtaattatcaagatcaagccttgctgtgcgcttatataattcgagcgctttcttttccagcttgagttcggctgcgagaatcgcatggacagagggcgataggcttgattcatgaacagtcatcggctcataaaattcaaagtttcgccgtttttcttccattgtaaaacggtcattaaaaagataaatgccttggagaacatctgcctgcttaataaaattggagcggagaatcttgtcccatgaccaattctggtaaagaggccgttccgctggatctaattcgtcaactgcttgcaggtctttatccaagaacgtgtcatgctgaacgaaaatttgcagttcttcactatacggatagtacatgtgctggatgatttctctccagactttcaattcttcttcctgtacatccagaaggcggcgtttctccgctgagatactttcgagactttgtagagtatactccaacgtccaagccgcaatgacattcgtataccaattgttgttaacgttgttttcgtattcattcggccctgtgacgccatggatcatatacttattttttcgtttcgagaagtgaacacggtcggcccaaaatctgctgactgccacaagtacgtctatcccgtattcttccatatagttacggtcgcctgtataattgatataattgtagatcgcataacagatcgcgccattgcggtgaatttcttcaaaggtgatttcccattcgttgtggcattcatcaccggtgaacgtcaccatcggataaagtgcccccttcatccccaattttgccgcgtttcgttcggcagcctccaactgatgatagcgatacaaaagcaggtttttcgtcacctccggctcggctgtcgccaaatacatcggaacggcgtacgcctcagtatcccaatatgcggcacctccatatttctcgccagtaaatcctttcggcccgatattcaaacgggcatcgcccccgtaatatgtcgagaataactgaaagatattgtagcggattccttgttgaagctcctcatctcctttaatctcaatgtccgcttttgcccatctttccttccatcgatcagtgtgcctccgttttgcatcttcatagccgttctctaccacatccgccaaaagctccttggctttcgataaaagctcttcctcccgaaaatcacgggaagtcgtgacaatcacaaactttttcaatgatgccttcgtttggtagctgtagcgattctcgacatacatttcattcgttttaaagcttttattgacaaaaccctccgtctcatttgccattgcggctaaaaccgtgaagcgcggtgttccaaatggattttcgatcgtttttgccgctaaatggccgctgtgagaatcagcacctttcgcttcctcctgccaaaactgttcttggtagttagaatcttcatttgccacatttccatccaggtaaggaacaagcgtaatgacagcatctcccgtcaggcactccgcttcataatgaatcgcacagagttcttttacagcaaggctaagaaaccgctctgacctgattctgacggatttatcctgaatgcggacaacagcgcttcgccgcagaatcccctctttcatattgagttctacctcaaatgattcgattgggttttgatggagatcgattttttcaccgtcaacatataggcctatgcccataaagttcatcgcattgatcacttttccgaaatattctggatacccgtttttccaccagcctactcgcgttttgtcggggaaccacacgcctgcaatatatgtgccttggtgactgtcgcctgaatagccttcttcaaaattccctctgacccccatatagccattggcaagagacgtcaggctttccagcagccgtgtatgctccttattaaatgtatttgttttgattttccattcatcaatctcaaataaccgctgatttatcatcatttcctcccgaatgtaagtttccattatcacggcgggttttggtcaaatatctaaatgcaaaagaaatcatcaaagtaacgccacacgaatggatcatcaatacagtaatcaaatcaaaatgaaccatgccgatagcagctgccgcaaatgccggcagtgccgaggcgcaaatcgccgtagatactgcttccttgaatgacgcaatagagatcatgtttgatatttttgtgatccagaggccacctgcaagaacaaacgttaacaaaagctggatcataaagattaccgcatatgccagcatcatgatcatcggcttatactgtgccaaccataatgtatcgatcaaaacctctacatcatggacgtttggtttctcgagcttaacgtccattttcgcatagccaacagaaaaccccgtttcgttttgatcggtgatcaccagttgatcaggttgaaatatgatagcgttttcaaatccagttactttcaatcgcccattttcaccgcttgtctcatattcatgcttcatatcgactgccatcacattctgcccatcttcaatcctctcagaactcttcccgcctgttagttttccgttcctgatttgaaaaccctgtaattgatcagcaaattgatcattaaccccttgaatcgctgacggcatgaaagatgcaacgctgaagcgatccattttcacaaacgaaaccgctaacggcgtcattaagcaggccgttaaaaacagaaagagaaaagagagctgcagccagctgaaagtattcccgtaacggcaaacacctgatggggatgcacccgccttcaggcagcggatgataaagcttttattctccagattcttcattggcattacccctttgttccgccggctgtcaatccggacacaaagttcttttggagaaaaaagaataagacgcatatcggcagcgcggcaagtatggcaccggctgcaaatagagctactttttgctgctgcggattagaaataaaggattgtaatcctacagcgatggtcagcctttccggtgagcgaagcagaaatttcgccagcaaatagtcgccaaacggtgccataaacgcccaaagcgcttgtaccgcgagcattggcttaacaagcggcagaacaattgaagcgaaaatcctcagatgtcccgctccgtcaattcgcgcggcttcatcaatttctctcggcacagtatcaaaataacctttcatcagccacgtgttcatcggaattccgccgccgatatagatcgctgttaaaaaccagtattgatcgagtgcgcctattagcatcgccaagacataaaaagcagtcagcgccgccattgtcggcaccatttgaatgattaaaaagaatatcaggctcttttttctgcctgcaaaccgatagcggctgtacgagtacccggcaagtgtcacaatcgtaacctgcaaaaccatgaccgatagcgcgatgacaagtgtattgctgtaccaatgaagataaagcgtttcttcaaatagccgcttaaaatgatccaacgtccaaggacccgaaaaatcgagctgaaaagccgccgaattccccacacggaaggctgatgatgccgtaatcagcaacggatatataatgacaatacttaaaagcgtcaaaaagaaatacgtacagattttattaagcattctggcagtgctcgcgttcacctacataacctcctcattgccaaaagcattcgattttttgaaagcaatcagtgaaattccaatgacaatgaaagaaattaacagtgtcacagccgccgcaacggaatattggggtgatgtgcctgttgtcagtttataaatccacgaaattaagatatcggtcgatccggccccggctcccacactgcctggccctccctcattaaataaatagatgatcgagaaattattgaaattaaacgtatactgagtaatcatcacgggtgctgtggcaaataaaatcatcgggaatgtaatatgccgaaaacgctgaataaaagtggccccgtcaatctttgccgcttcatacaattcacctggaatcgcctgaagcactcccgttaccatgacataaatatatggaaagccgagccacgtctgaatcataatgagggctgtctttgtccagaaaggatcagtcttccacgcgatcgcaggcagctcaacaaacggcaggtgattgaatagtggaatcacctgtgcattcaccgctcctatgctgtcgttaaacatgttggaaaaactcatgattgtaataaacgccggaacagcccatggaaataagaaaatcattcgaaatatccgcttgccttttataaaatcctgattgacgaaaagggccgtcacaatacctaaaatgatttgcagcgttgttgcacagattgtccagataaccgtccagcccagtacattcacaaatgtttcacgataggagccaaggaaaaaaatattcaagaaatttttaaacccgacccagtcaatcagacgattaggcggaatatgataaaaatcatagtttgtacatgcaacaaacagagtcaccaaaaccggaaagataatcacaaacaccatcatgatatatgccggcagtgtaaatagatatggaaaccctttatcgcccgcatgacagatcatatccttggctattgtattgacttccaaacccgccgctttcatagcggcggtcttacgtgaatcatgaatattaaagatatagaacatgaggaaaatcattgtcacgatcaattgcagcgtgccttcaatcagcataaacagcgagtggtcttcaccgggaacacttcccaatgtcatcaatccggttagcgcctgtataccgaaaacgcataattcaaaagcaaacaagcctgtaatggcaagaaataagagcccctttgacaattgctgattcgcaatctgcccaagtcctggaatgatcgataaaagccctgcctttcgtttttgctttgcaagtgtgtgatgtttattcattttttccgccctctattcttccggacgctatcccgccgttttatttcacatacttttctttaatattttcctttatgacgtttacagcatcattcgctgatgtttgtgtcgatttttttcctgaagctgcatcaaaaattaaactttccgctcctgtccatacttcagccatttccggaatatttggagtcggcgtcgctgtttcatattgtttaatcacagctgacgtcagttcattcttttgctcatcggctttcctccttgcggcagtgttggccggaacttcgtttgtattctgataaaaagcgtaagcattggcatcatttgcagcatactcaagccatttttcagccagctcgggctcttttgtatattttgaagctacccagcccttcccgcccgcaaaaggggcatattcttctccattgggcaatgtcggaatgggagccgctccgtagttcaatttagcctctttatagttggcagctgaccaaggaccgccaatgatcgcagccgctttgccttctaaaaacatctgctgaataaagtcgtctgcgcttgaattgtcttgcattcctttcggccaatatgtttcaaaccatttctccgcatatttcaccgcttctacagcccctttattgttcaggccgatgtccccggaatctgtgccgttttttccaaacacatatccgccgtaaccagccaataagccgtacgacatataaaagtcagtccattttgctaaaaatccggttgattttcctttttccgaagcaaacgcgaatcgaggatcttccgttaacttttcaaggtctttaaatgtttttggcgctgtttttaaaagatctttgttgtaatacaaaataagtgtctcaatgactagcggcattccgtacactttgccgtcaactgtcacctgctgcatttctttatcaccaaagctttttgtgttagatggcttaatatcaagtaaatgtccttgttgtcccaaaccgccgatccggtcatatgcagcaagcataacatcaggcgcattacccgccgggccatcaagaggaagcgcttctaactgttcgaacatttgcttttcaacaatttttactgtgacatcattctctttttcgaactttgtttttatgctttcaatgtattctttatacgtttcttcgacggacacagtcagcacctttttgccatcagcgcttgctggattttttgaacttgagcaggcggcaaggccgattgccaggaatgatgccgccaatatggcgaaccccttttttaaaagaaccatctcttttcccccttctatttacgaaactataacaattgtattgtcctatagaaagcggttacaacaacttttgatttgttaccgataacagaatgttatacaggggcggcagcactcaaaatcaaaaattctcccggctgaacggtaatgacatcgtgatgctgaagcggctgctctgtccatgcatcacagatcctcttattcctttcaatattcaaatccagtaaactgacatgttgaaccgcattcccttgattaaagaaataaatcagtattttttcatcaagagtccgtgaaaagctaataaaatcgttttggtcatccagcagattccactcaagatgtccttcagtcaataaagtgttttcctgcttgcgtaaagcaattaaccgtttcataaattgcagcatgtcttggttttgcttctctttttcccaaaccatacattttcggcataatggatcattttcgccgttcagcccgatttccgttccgtaataaatgcatggtgagcctgtctgggcaaacataaaggccagcaacgcgcgtgctttcttctcatcattgcggcatctggtcaaaaggcgctttgtatcatggctatccagtaaattaaacatcacctcattggcctgcttcattccattcatcaaatgtgcattgacacggtgagccatacgtgaagctgagatcgtctggtcagcaaagtattcaatcataggctctgtaaaagggtaattcatcgccgcatgaaattcatcccctctaagccagggttcggcagaatgccagatctcacctaaaatataaacatcaggcttttcagtagatacagcctgcctaaatgtcttccaaaaagcgtgatccacttcatttgcgacatccaaacgccagccgtcaatgtcaaattcgcgaatccagtacaaagcaatatcaagcaaatatttctgcacctcgggattagccgtgtttagcttcggcatatcagctgtaaaagcaaacctgtcataattgtcgtctgtgacgggaaaagagtgaatatggaaccagtctttatagcgggattgatctccgtttttgacgacatcctgccattgcggagacgcgcttcctatatggttaaaaaccgcatcaagcataattctcatcccccgctgatgcagctggctgaccaatgtacgaaaaagctcaggatccccgaaatgcggatcaatagaaaagtaatccagcgtgtcgtatttatgattagaaggcgcggaaaagatcggtgtcagataaatgccgttcacccctaaatcctctaaataatcaagcttgtcaacaattccttgtaaatcccctccaaaaaaatcattgacgcccgggtccttgctcccccacggcaatgcattcttcggtgacaagtcttctcttccatttgcaaaacgctccggaaaaatttgataccaaaccgttgacttgacccattcaggcgcttgaaatgtatcagcctcgtgaacaaacggaaatttaaagtaataatgaatcgtttccagtgttttttcgttataagggcatacacccgaacttccgaaaaagatgtcttcatgatcgtctgttacaacaaacgcatattgtaaacgcctaaatggcggcaccacttcagcaaaccaatagtcatgcatttctgtagcagcaattttcctcatcggctgctcgtttgccgaccacttgccgtcgttgtactcatagggatcaccccaaatgaatcgaatgtgatctgcatcacctttttttgtccgaatcttgatatgcacagcccgcccatcataagaataagcatctgtgctgaatggctggtggtgaatcgctgcatattccatcatgtttccccctttgatttccgttttattgaagccggctcatagtttgaaagtatcatgatgaaattgtgggaacaatccttttcaccctgttaccgataacagaataaggcgcttacagcgttgattctcgtacaattaactctggttcaaaaaatagacttccttgtgcagcaccgtcttcattcatttttttcagcaacattttcgcacaggcttcccccatttcaacaacaggctgtctgaccgtagtcaagcgcggcgaggagatgcgatcaagaaacacaccgtcattcccggtaaccgcaacgtcttccggaattctctttccaagggattgcgccgcacgaatgacgccgagcgcgattcgatcagatgcgcagacaaatgcggcttgattgtccatggatttcagcagttctcttgcaaggccctcacttttcttagaactgttgtcgatccgaaacatattcgattttttaaagcttttattcatcgcccgtatatacccctgttctcttgcacgttcgaaaggctcatctaaatcaatgccaaaaaagacaacttcccgctcccccagccccataacatggcgggttgccataaaagtgcctttctcgttattcacatcgataaagtcatagcccatttcattttgtccaaatacgacgagcggcttctcaaacgcttttattacaccttcaaaatcgttctttctcaagccggtggcaataatgccgtcacattggccaatattaagagaatttcttgtcacaagctggagagcatagtgattgcgatccagctccctgctgattcctgtcagcaggttcatgtaatatggttctgtcgtatccatttcctcaagtatcaatagtttcacaacctgtgttctgttttgcacgagcgctctcgccgcataattagggatgtaattcagctctttcatcgcagaatgaacaagctttttcaattcatctgtcaccgtctcagggtgattgatcactcgtgataccgtcattttcgaaacatttgctttttttgccacatctgacaatgttgccattttcatcccctccttatctgtgcttattatccaaactagtgataaagtcctctattactgttaaatatacgatgcaggcaaaagagaaataaaaaagagatttcccttaaggaaacctcactttgttaaaaactctcgatttttcatggattcatacgctaggtggcagactcattctctccacttccatgagaaagtctcttttttaaatttctgtccactttttttctaaaatcggataagaataattttgcatttgctcaattaactcatccggccgtgacgagctgtgaatcagttttaggtgcgattcgttagaaaacccttcttgaatgctgtatttcaccattttcatcattggttcaaaatatccgtttacattgtacagtccgattggcttttggtggatgccgatctgtgcccagcacagcacttcaaataattcttcatatgtaccaaagccgcccggcatcgagataaagccgtccgccagctcgctcattttagcctttcgttcatgcatcccgtttacttcaatcagctcagtcagattctgatggacaacctccccgctgaacaaaccgctcggcatgaccccgattgcagttccgccgttttccataatcgcgtcggcaatcgtgcccatcaagccgacgcgggagcccccatagacaaggccgattccctgctcagccatatacacgccaagctctgccgcttttcttttatacgcttcatttcccccagggtttgatcccgcaaatacacaaatggttttcatcttgtcatctccgcatctatatatcgtgttaaacattcaaaaacacactatatattgtcccatcttcatgtgataatatcaatatgaaatacataaagaatgcaggagtgatgaggttgcagctggctgatgcagaaaaatggatgaaagagttttacgaaaaaagaggctggacagaatacggaccttttattcgcgtcggctttttaatggaggaagccggagaattggcccgggctgtcagggcgtatgaaatcggcagagaccggccggatgagaaagaatcgtcacgcgctgagcaaaaacaagaattgattgaagaaatgggagatgtcatcggaaatatcgccattcttgctgatatgtatggtgtctctttagaagacgtcatgaaggcccaccaagaaaaactgacaaaacgatttgagcatgcataaaaaagcggccgcgatggccgctttttttaacctgtgatttcatcatggtgatcaaagaaatgctgctttcctattttgtgaaaaaggcctgttttatgcagcagctcctttggctgcgattgcaatcctacaatcatcagctttccattgtggcgtttaatccgattcataatgttcccaagcaccgcttcagctgacgtatccatatagtgcaccttattcatgagcagaatgagggttttcggttttttctgtacatgctccagcaatgacgattcaagggaatcaattgatccgaaaaacaacggtccttctatggcatacatgctgacagatggatcttctctcttcgccagaacaggatgcgattcctgattgtggatgcgggtcgcttcgctcattcttctgataaagaacacaaatgcaagcagcaatccggttgccacaccgatgattaagtcaaacagaaccgtaagggcgaaggtcgccgccaaaataaaggaatcagcgtttttcagtctcagcatgtttgcgacttccttgcgctcactcatattccatgcgaccaccatgagaatcggtgccatactggcgagcggcacatgggacgcataaggcgcaaatacaagcaggacaaggagaacgactacgccgtgaacgacgccggaaactggggaaaccgctccgttttttatattggtcgccgttctcgcaatcgctcctgtagccgggattccgccaaacaggggcgctgccatattcgcaattccctggccgacaagctccttattgctgtcatgctttgagcccttcatgttatcagcgaccattgcggacaaaatcgactcaagtcctccaagaagcgcgatgacaagcgcagccggaaacagcataaccattttatccaaagtaagctcaggaaactgaaattcaggcaaatggcgggggatttctccataagttgacccaatcgttgccatgcggtcagggaaaaagacaaccgcgaccactgtggaaataagaagcgccaacaaagcgcccggcactttaggcatcaccttggcggatacaagcaaaatgacgagcccgatcacagctgtcaaaatggcatatacgttaaaggtgccgagctgctgtacaatttcaaacatgttgtggtgaaagttctcatgtttttcaacatttctcaatccgagaaaattagcgatttgttccgtaaagatcagcacggcaattccggctgtaaaaccgacgataacgggtttaggcacgaatttcattatttttccgagcttaaacagcccaaacagcaccagcattacccctgccataaaccctgcgatcagcagattctctaatccgtactgcatgataatgccgaacagtatcgggacaaaggcgcctgtcggaccgccaatttgatatttagatcccccgaacaaagagatacaaatccccgctataacaacagtgtacagcccgtattcgggctcgactcccgaggcaatggcaaacgccattcctaaaggaattgccacgacacctactacgatacctgcaattaagtctttctgaaatttctgtaaattgtatcccttgaatctccctgagaatcgcatattttgttataacctcccttatgagtgattgtttattagctcagtttcataaccgttaatgaccacatcaagttttcctgtttcagggtgaatgacaagcccgtgaaccggcacttttttcggaagcagcggatggttcttaatcatgttcacactgtgggaaacgctttcttccacgctgtgaaaaccagtcagccacgttttcaaatcgagtccggcactcgtcagcaaattcaggcagctatcctccaccccgcgttcctttgctttctcaagaatcgaggacgcattcagccctgacattccgcattcatgatggccgacaatgcatacctcttcagcctgcaattcataaatcgcgaccagtatgcttcgcatcacgcttccaaatgggtgagaaacgatggctcccgcgttttttacaattttagcatcaccgtttttaagccccattgcttgcggaagaagttctgtaagccttgtatccatacaggtgacaatgacgagctttttcgaaggaaactttgtcgttttgtacggttcatacttcttctcactgacaaaccgctgattgtgttccaaaattgatgttaaagaaaccatttgattcatctcccatccatatgattttgcaagccttcttacccagcttacagtaaggaattatagcataggaataagccaagaaaaggctttcaaaaaaagacactataattggactgtagaatcaaaacataaacatttatatctttcaaagataataaaatttatatttaatgaatcctataatccggctgcagctcgcatattgatgatttgtctgacaaaaaatatgggtgaattctgataattaaaaaacttttttaagcagatatagctgttcgatcttcattttaagttcaaaagaaccagaaactaaaaaaacgcagctatatttttaacacctatttattttcgatataatgaaatagacaacagccataaagggggagccttgttgaaaccatttgtatttatcacaaaaccgattcctgaagagattgaagcattcatcggtgaacattgccgttatgaagtatggcaggaggatacgcttccgagtgacgtgctatttgaaaaattaaaagaagcggagggacttttaacatcagggacgtccgggccgtcaatcaatcgtgagttgctggaacacgcgcctaagctcaaagtggtcagcaaccaatcagtaggctacgataacttcgatatagaagcaatgaaagaaagaggagtcgtcgggactcatacaccttatacactggatgacacagttgcagatctggctttttcactgattctgtcttccgccagacgtgttgccgaactggaccgttttgtcagagcaggaaaatggggaaccgtggaagaggaagcgcttttcggaattgatgttcatcatcaaacgttaggcattatcggcatgggcagaattggagaacaagcagcgagacgcgccaaatttggttttgatatggaagtgctttatcataaccgacatcgcaaacaagaaacagaagacagcatcggcgttaagtatgcagagcttgatacattgctggagcaatctgattttattcttctcattacgccgctgactgatgaaacctatcacatgataggagaacgcgaatttaagttgatgaaggattcagcaattttcgtcaatatttcccggggaaagacagttgatgaaaaagcactgattcgcgctcttcaggaaggctggatcaggggagccggcttagatgtatacgaaaaagagcctgtcacccaagataatccgctcctgcagctggataatgtcacgctgcttcctcatatcggttcagcaacagctaaagtgcgcttcaacatgtgcaaacaggccgccgaaaatatgctcgcagcgatccaagggcaaacaccgaaaaatcttacaagagaatttcaataaatcaaaaatccggtctgataacagaccggatttcatattacatacgctgaagaacagcacgcttataaatatgacgggtgacgatataataaagagcctggaatacaaaataaatgaagatgacaattacggcctcaagaaataaattggaattcagcatattacttaacgctgcatacgcaaagcccgcgtgaatcgtacctgcgataaatgggatgaagaataaaaatcctatttgctttccaaggatcgagtgaatctctttgtccgtaacccctatcctctttaacgctaacacctgcactctcgtatcttctatttccgtaaacatccgcaaatacagcatgcttccttgcacgataaaaaacagcacgctgacaaacagaccaataaacagcattaatgcaactccctgcttcacaatttgataactaggagcacgtgtttgaaaatcagatgtatgttctttcggcaccatgttttcaagcttttcagagacatccaccgtctcctgccaatgctcaagctcataacctaccattctcatctgttccttcagcggcacatcctgtgacagactgtcaaagctcttttcgctgacaaccaataaacggctgactccatcgacagacatcaatatccctttgttttgctgctttttcatgacataggaaagggtttttcctgacttcatatgaaatgctgctgtttccccttctccaaatgtgtctttcaccatcatttgaaaagaaacattaataaatgcttcattttcttgtaaatgaataactgggaaccctttttcctttgcgacttgattatagactttttctgaaatcagcaaagcttcagcttccatcttcttatttccatacggcaagtctgactgaaaagtgacaggaatccctgtggcatccaccttatacttgataacagcatgagcttttttcaatgtattctcagctgtctcaggcttcatgacctgaaagcgggaagcatccttttccacccaggaaacagactgaggaatgctttgctcctcctgcctttgtaaatcggaataaaacatatagatgacacctgtagctgttagtatgaccgctgtaatgacagaggttaaaaacagcatgcgtgcatgatccttcagcctgaatatcatgttggaacgcacaatgatattcgtgcctttgtagaagctgtgtttctttcggtacagcatgcggaaaaacgccacactgctttgtgtaaaaaagaaatacgtgccaactaacactaaaatcaaaattggaaatacccgaaacatcatgtcaatggcattggctgttgcagatagataataaccgctgccaagacatagcaaagacaatacagtgagccatttcgaataaaccggcaaacttttcggctttttggccgatttaatcagttcaatgatttccagcttccgaatccgtcccagtgataaaatgagcagcgtctgaaacaggatgagaaagccggcaattgtcatcacaaacgctttcggcacaatggcaaacgaaatcggcaccttcacgctgagcatccatgtcataatcataaaaaacagttttgaaaataacaggcctgctccaatgccggccgcaatcgccgcaagagaaataagtgactgctcataataaatcatcttgcgaagctgctgctttgatgtgccaaacagtgtcagcagcccaaactctttctttcttgcctgcaaaaacgctgaattggaatatgtgatgaaaaatatacaaaacacaatgatgacgacaagagctgcgctcaagcatgttttgacaaggcttccgccatatatattgtcttcattgacatcaggatgaaaaataaatgatgtgaagacaaaaaacaccgaaacggcaaacacacagcttaaaaagtaggccacataccgttgcagattcccaagaatgtttttacgggcgatagttctcaaattcatgaaaatcgcctcccaacacactcaaggtatccaatatactttgataaaacacctgcctgtttgttcctctgtgaatctctgaaaagaaacgtccgtctttaataaaaacaattcgtttacagaaacttgctgctgtggcatcatgcgtaaccaacagaatcgtcgcttccttttcctcattcagctgagccagtgtgttcatcacttgctttgccgattttgagtcgaggtttcctgtcggttcatcggcaaggatgagcgccggattgtgaataatcgctctggcacaggctgcccgctgctgctgtccgcccgaaacctcatatgtgcgatgatcgagaatgtgcttgatttgcagcgtatccgccagttcatccaatcgggcttccatttctctcagctttaccttatccaatgcgagcggcaagagaatattttcacgaatcgtcagcgtatcaagcagattaaaatcctgaaagacgaagccgagttctcttctgcgaaacaaagccagctcttggtcctttaacgttttcggctgaatgccgttgatcatcatctcgccctgggtcggcttatcaatggtagccagcaaattcaaaagcgtggtttttccgcttcccgacggccccataatcccgacaaattccccttttgacacactgagatcaaaggcgctgagcgcttggtatgatattgttcctttatttgaatagtacgttttcgataggttcgttgtttgcaacacgttcatgttctgctcctcctttttctttattataaaaaggaagtcagcatcctcccatcgaactttcttgcaattccgctccccaaccttacaatgctgtcacattcacgagggtgtcacttgaaaacacgatggtcatcacagtgccagccccttcttttgattccgcatacagcttatggccgagacggctgcacacctgttttgctaaataaaggcccattccagttgcctctttcatggttcgtccgttttctccggtaaaaaacgcgtcaaaaatccgcggcagatcctgtggcggtatgccgattccttcgtcggcaaccgacaatcgcgtctcatgtccctgtgtttcaatccggattgtaatagggtctcccacaccttgctttgaatattttaaggcgttgaaaaggatttgctcgacaacaaaggaaagccacttttgatcactggaaatctgaacggcatttggcggcacatgtaatgttggaaaaaggcgccgtttaataaactgacgtttttcctgattgatcagtgaacgaaccatttctgccaaatcaaaggtttgcggctttacatcaaatgcaaattcctccagccgagccgtttgcagcatcatatcaagaccgtaacgaaatctctcattctcatcctccagctcctctaagaacgtcggaaaagaggatgaggttccgttttttccttcctgaatcattaaggatatgacggataccggtgttttcatatggtggacccattggttggtgaaggtgtaatgctgtttttgctgattgatatattgtgagagcctgctttcgtattgctgcccgagtgcgttgatcatcttcgtccaaagcacttgctctcctgttcttggctttctggctttcaaagactgtccgatgtcattcgaagaagaggcttgttctgcaagctttttaacatatgtgagaaaggaaatttgccgaacataatcaacagcaaaacctgcggctaaaagagtaccgggcaaaatccatatgtacatcatattttctttggaaggttctgcgccgctctctacaatgcttaaatacgcaatcagcatggcggaccctatccctaataatgaaaatagaataatggctaagcggtcgatgagataagtctttaacactccgcttcatccttccgattgacttgaaattgatagccttgtcctctgattgtggaaatgcaatctgtcagtcctgcattctccagttttctccgcagccggttgacattgaccgttaacgtattgtcatcgacaaaatcaacgtcatcccataacgcctccaatagttcatcacgagagacaatttttttatgctccctcacaaaaatagagagaagctgaaattctttttgggaaaacagaatacggacgctgttccattcggcctcattttgatcaggataaatcgtcagcccgccaagctccactattctagattcctgcggcaaagagggcgagtattcaccatatgtgcggcgcaggacgcttttgattttggccatcactacctctaaatggaacggttttgtgatataatcatcgccgccattttcaatcgccattacctgattcagctcatcggtccgtgccgatataaagataatcggcgcattggaaatggtacggatttgcctgcaccaataaaacccgtcaaaaaaaggcaggttgatatcaagcagcacaagatcaggcttcatttctgcaaattccaattttatatcattcagctgttcagcaattttcacttcatatccgtatttttgaagatgaccgcccagcaaagaagcaatccgctcatcatcttccacaagcaaaatccgatacacgttgatcccccttatatgtacatcacgatgatttttctagaagattccaaaattattatagcatgtgcggaatagtaaatcggtctttttctttttgttatgatagaatgataaaggtaaaattttcataataggcaggtgtcgtgatgaagaaaatcatgctgtttctggcaatgacgtcaattctttcagcatgtcagcccaactataccgggaaatacatagaaattggggatacactaactgactataccaaagagtgttttaaagagaatgaaattccttataaatacgaaaagggaaaactgtatatcccagaagatgcatttgatacagcgatctacacttgttcataagaaaaagcttgcagataacctgcaagcttttcacgttacaaaaaatgagtatttaatttctcttcaaatcctgaagggccgatgtcgcttttttgaatgtcaccgccgttttcatgaatcgtaaaatggcgctctgacatgaccatccttccgctcggcgtcagctttgaggcaagcagggatttgttaaaaggagatttttcatgagagtgaatgatgtccttcatgttatctaaatcaccgagatcactctcttcaagagtaaaggcgtacccgatttgccagccttctcccttgtccatcagcagaacatggctgcccttttctgtctcttctcttttgattcggaatgacccgactggtgactgtaccgtttctccggaaagcggtatcggctggagcgccaggttgatgccgaaaccgatatcaacgaggtaatcgccgttttccgcagacagccatacagcagcatgcgtcccttctagtgcccatccctcttgattgcctgcataaaccgttcctcgaatgagcttcacgtgaaacccggcctcacgcaagacaaaataaaggaaaccatttagatcgtagcataggccgccgtgctgatctttgagcagacgtcgccatagctcttcttttgtgatcttataattctcttttgcaagtacggcacggttttcgaatggaaaacggtatgccattgctttgagaaaaaggggaagatcgccgaagctgacatgatctttctcccagccaattttctgaaagcagtcttttagaaagtcactcatttttatcacctaaacttcttcttgaacgtaagcagccagcttctccagcgcctcttgttcatcttctccctgggcaatcaaggtaacctcagtgcctgtgcttaccgcaaggctcatcagccccatgatgcttttggcgtttacttttttcccatccttctcaagaaacacatctgacgtaaaccggtttgcttcttgtacaaacaaagcagcaggacgtgcttgcagtcctgtctttaatcgaacttccactttctgttgaaccataagatctccccttttctttacggttattttaaagtgacggtttgccctgtccgcagctgttctgcgatttcgtcaagttttctcagcctgtgattgatccctgatttgctgattttcccgcttgctaccatttcccccagctctttcagcgtcacttcctgataatcaatccgaagctgcgcaatttcccgaagtttttcaggcagcgcctccaggccgattctttcatcgatgtatttaatattttccacctgtctcagcgatgcgccgatcgttttgtttaagttggctgtttcacaattgacgaggcggttgaccgaatttctcatgtcccgaacgattctgacatcctcaaatcgcagaagcgaattgtgagcaccgattacgtttagaaactctgtaatcttttcagcctcttttaaataggtaatgtagccttttttccgttcaagcgttttgctgtttaactgaaactcatttaacaggtcacataatgaatcgttatgctccttataaagagagaagatttctaaatgatacgaggaggtttccgggttattgaccgaacctcctgccaaaaatgctcctctcatataagaacgcttgcagcatctctttttgaccagctctttcgaaatacttcgttcaaacacaaaattctccccgagtatttttaaatcctctaagatcgcttttgcattttctgaaaaacgcacaatatagacgttattctttttcagccgcattttctttctgaccagcagctcgaccgacacatcatattgttttttcagcaatgtatagatgcggcgggcaatcgccgcgttttcggtttgaacatcgagtacgagatggcggtttgtaaatgataaagctccattcatccgaatgagtgcagacagctcggcattaatgcagcagtccttcacttccagattcgttaattctttttttgtttctgatgcaaatgacatatagccacctcatttcaaggcttcattctttcagtaaatcaacaagaagagaggccactttatgtgtatcgtgacgtattacgtcatttttatacgttacaatttgatctctgatgacttcaagccccatcgctttcagctcttcgatatcaaaatcaacaggacgcgccgattccatttcgtacttacgttttatttcgtcgggaatgtcttcactgttcactaatatcgtatcaataaaaccgcagcccatatgctgattgagcgctttcacatgatcagcagcggtgtaatggagcgtttcgccgggctgagtcatcacgttgcaaatgtatacttttttcgccggcgcctttatcacttcttccccgatttttgggacgagcaaattgggaagaatgctggtatagaggcttcccgggccgataataatcaaatccgcttccctgattacgtctattgtttccggcagcggatcaatctgttcaggcgtgagaaaaacacgcttaatgcgctgtccgtattctgggatcgttgactcgcctgagaccacgcggccatcttccatctcagcatgcaaaacgacactggcattggcagccggcaaaacctttcctctgacattcagcaccttgctcatttctgtgacagcgtgaaaaaaatcaccggttatatttgtcatcgctgccaaaatcaaattcccgagagaatggcctgttaagtcattccctttattgaagcggtgctgaaaaagatcttcaacaagcggctccacatcggataaagcggcaagcacatttctgatgtctccgggaggcggaattttcagttcattccgcagacggccagagcttccgccatcatcggcaactgttacaatggccgtgatgtcaacaggtttatgctttaggccccgaagcaatacagaaagacctgtaccgccgccaaagattgcaattttcggcttttgtcccatcttatttccggcttctcttttcaatgtcccggtgagtaacatgagtatagtaatcctttttgaaataatcagctaaattctcggctaatgtcacagagcggtgctggccccctgtgcagccgatcgcaatgacaacctggctttttccttctcttttataagatggaagcataaagctcagcagatcaattaatttctcattgaacttttgtgtttcattccacttcatgacgtaagaggaaacttctttatccttgccagtcagcggccgcatgctttcgatatagtacggattcggcaaaaatctgacatcaaagacgagatctgcatcaattggaataccgtatttaaaaccaaatgacatgacatttacggtaaatgtctctccttggtttgtcgcaaagtgcttcacgattttttcacgcaaatcacgcggcttcatgtcagacgtatcgtaaatgatttgagagcggccttttaattcctcaagcagctctcgttccagcgcaatgccttcaagcggcaggccagtcgctgccagcggatgcgagcgtctcgtttctttatatctcgtgacgagaatggaatccttcgcgtccaggaataaaattcgcggtgtgatccacggattttcggccatttcatccagcgcttcaatcagccggtcaaaaaattcgcggccgcgcagatccatcacgagcgcaactttgctcattttcgaatttgattccttcatcagctctaaaaacttcggaagcaatgaaggcggaagattatcgacgcagaaatagcccagatcttcaaagctttggatcgcgacagttttccccgctcccgacattccagttataatgacaagctgaatatcatgtgattcactaacactcatctttctcccccctgacttgtctttctatttgatgtgctgcgggtctaaacgataactgagtagctcaaattccggtgtatacgtaaatgtgccgtgcagcagcccttgtcccttcatcataaaatcaaggatatggccgtctccaggggccataggcaggttctgaatgtcattgacatcgtgccactgcagtttgccctcctctgattcagacacattttgtcctgtataagaatcagcgacaaacgtaaacatcatccactcggagacaatgtggtcaccgtctttaataataaaggtaaaaacgccttttaattgaggatttatgatatagataccagtctcttctctgtactctctgatgacggagtctctgactgattctccgctctccatcttgccgcccggcgcgacccaccagccgcgtctcggcttttgaagcagaagaactttgtcatccgtctgaagcacacaatttgtcactctttgcaagtacgtcacctaaccttcgtcctgtcatcgtctatttattataccgcttcaagatgcctcccacaatgaagagacattgacaatcttttcttctattttacagcatattcattccttaattcagatgattttgctgtaactggaattctcttttatttatggacaaaaaaaggacacggataactggagaatccgtgccaaaaaagtgtattcattataaaaagggggtcaattactttattaatcataaccgaaaagcattacacatgtgttacagcggaattaaaacccagtaacgtaatgtgaaactcgtatgacagccctttttattttaaggttttcagcgtttcttggagctcttcgacataatgctgtacgctttgtgccgcaatgcttccgtctcctgtagccgttacgatttggcgcagtgatttttcgcggatgtctccggcagcgaaaatcccttcaaccttagtttccatgcggtcgtttgtttcgatatagccttcttcattcgtaatgcccaggttttcaaacggtttagacagaggaagcatgccgatgtaaatgaatacgccgtctgttttgaattcactttcttcaccggttaccgtatcgacaagcgttacgttaccgactttgccgttttcctcatgaatttccttcacagttttgttccataggaagtcaactttttcattatcaaatgctctcgcttgaagaatactttgagcacggagtttatcacgtctgtgaacaatcgttacttttgaagcgaaacgagtcagatatacgccttcttcaaccgcggaatctccgccgccaacaacgacaagttctttgcctttaaagaaagcgccgtcacatactgcacaataagatacaccgcgtccgcccaattctttttcgccaggcacgccgatttttttatattccgcacctgcagcaatgatgacagcacgggctttatattcctttgaaccagctttgactactttgtactctttgccgtcaatgacctctttaatatcgccataagcgtattcagcgccgaattttttcgcgtgttcaaacattttgttagaaagctcaggcccaaggatactttcgaatccaggatagttttctacatcttccgtattggccatttgtccgccaggaattcctctttcaatcattaatgtcgataaattcgctcttgatgtgtatacagcggccgtcatcccagcagggcccgcgccgattataatcacgtcataaattttttcttctgacacactattcactccttaaaccatcttttcaagtttgggctctttcttataagataagaatccccatcaaacgtattccttacccatatcctataaaatctcatggtgatacgctatttttttgctcaacacgattaaatgtattcgaaaagggtatatgttaataaagaaagagccttctgttttagaaggcccttgtcatatttattattgaacaacacgtcttacaacgcctttaaatgcttttttccagtaaggattgctcatagagtcaacagatacgccatgagatgtattgtcgtttaggaaagtaccgtttcctaagtagattcctacgtgtccatttgttttgtaagtgtcaaagaacacaaggtctccgcgtttcatttcagacgcgctgacagcttgtcctctgccaactaacgtatcagtagttgttccgcctacaggtccaaggttaacacctgcagaagcgtatgcccagcgtacgaatgatgagcagtcaaaaatacggttgttgatatcagattggctgcgtccgccgccaaacttgtacggagattgtcctacaatgcttgaaccaacgctgatcgcgccttcaattccgccagagttgctgataacagtgccgcctgaattgctgtttgagccgctgctcttcttagaagatgagccgtttgacgaactgtttgatgaaccgttagaagaattgtctgaagaatcatcagatgagcttgcttttgctgattcagttgtcgccgtttgactgtcatctgtttgtgtttcgtcagatgctttttgtgcttcttcctgctttttgatcaaagcagccgctgcttcttgttcttttttgatgcgtgcttgttcagcttcagtatttgctttttgatttgcaagttcagacgcctctgattttaattcagaaatcgctttagccgttttcttctggcttgcttttgcttcgtcgaaaagcttgtctttttcattaagctgtttatcaaggtctttttgcattgtttctaatttagccaatgcagcttgaacttctttcagcttgtcattcaaatccgcttcagaatcctcgagcttcgctttatcctgctcttgctgtttgattaaatctttgtctgcgtccacaatagatgaaaccgcagtcgcacgagagataaagtcaccaaagcttgttgatcctaaaagaacatctatgtatccttgagatccgccgctttcctgtaaagaacgaacgcgttttttcaggatttcattgcgtttttcgatgcgtgcttcagtttctttaatctcttttttcagttttttgatttcttcttttgttttatcattttcttcttttttatcttcgatcttgttacttgtatcaagcgccttagcgttaatgtctttcagttctttttcaatctttgattgattttcctgaagttcagttaattctttttccttcgcttcaatgctggaagcaacctcagattgcttgctttcgattttttgtttcttttcatctaatgtttccgccgatgcagttttacttgtaaatgggatcaaaaaactgcttgtcccgatgacggaagccaaaccaagtgtcaataaactctttctcactttttatatcctcccttttactgtgaacctgtcctcatttggaatcgtattttgaacatcaagtttcgttcctcatactctacgaggaatgatggttgtttatggttaattattctgtgcatctcttattctggttgtatagcgtttatttcacatcatatgtaaaaaacactaattccttatgtacgagaatcattataccatcaagtttcgacaaattagcgataaattttattacatttatgtttcaaacagatgtcaagtcacacatcatttgtcatttttcttaagcgtgcaaaaaaactgtcgatattattttttaaatataatctatcaaacaaaaaagagtcgattaaataaatcgactctttaaaatttactattctagaatatcatcaatatatttcatatatttcgtcaacgttgccggagagatgccgaatcgggccgctgtgtcttttttcgtgtcttgcttgccatgggcttctttccaaatataacagatggctgctgcccagcctttctcattcttcaacggagcagctgcacgaatttgctggatgacatggaaaacccagcagctcatgacttctgttttcatctcttctttttcagcttgctctaatagtttgaccgtttgataggcgaaaagtgcatcctctgaaacgtcagcagccgcggaatctccattcagaagcagctttacaaaatgattttcaaaaggagcggtgattctctttgagcgtatcaccgcttcaagatgctccgtttctccctttgtgctgctgatataataggctgcgagacgctgttccacagatgaaggaagagcttccctccgctcaatccaaggcgccgggcggtcttcgccgggatattgcgactcgacttttctccagatcgtctcggcaaagtcggtatgtcccgtaaaataagcagagcaggaaagccagtaaaagaaggtgtcgtcaccttcaaagccggttttatataatgatttgagccatttatatccgatctcgtagcggccgacaagcgccaaagtagcacccaatttataacgctgctccattagcatcggatagacattggagagctgatcactcaattccaccactttttcgtcttctctttcataatagtagaaaacgagaagattgcataaggcgtgaagatttccttcattatgagaaagcacttcataagcggtttgcttcgcttttacaacgtttcctgaatagaaataggcaagcgcgagattgttgtatgctgaccaaagctccggatattcagctgtgatttcctcaagcgccgcaaccgcttcagcaagctggccgctttccagcaatgactttgcccgatcctgtttcaccagcagttcatcctgatcatacaacgaatcctcaatgccgtcgtctcctaaatcgagcaaatcaagcagactatcgttttcttcggcgaattcaccatccgggtccgcatcagaataagcggccgcttccttataagcttcctggaagagccccagatgggcaaagttattcgctttaaagtaatggcactccggcatttcggcctccagatttgccatgatatagtcaagaagatcgttcgactcttgatattggcccatttccgaataaatgaccgcaagctgtgaaagcatctctgaatcctccggctccaaatgaaccgcgcgctgaatcagtttgcttgcccgttttagattgcgctctttatacgctttcaagcctttatgaaaaaaatattgtccatcttgaagcagctggacaatttgtgcgtgatttttatgttcagaagtgtgttttcccacaactaccctccgttttatacaatattaccgtcagtagtataccataaatcgtaagcccctcaatagttcaaaaggaaggattgggaaaatccctcctcttttttattggctgattcgaccagaatttacccggctttgttttctaagtccgcattcattttcagctgctgttcagcaaaatccctataaagaccatgggaagccattaactcatggtgtgttccacgaccggtaatttcccctttttcaacaaacaaaagctggtccgcatctacaacggtagataggcggtgagcgatcacaatcgttgtgcggccctccatcagcacctcaagcgcctgctgaactgatttttcagattggctgtcgagacttgaggtcgcttcatcgagcataagaatgcttgggttacggagaagcgctctcgcaattgcgattctctgcctttgtccgcctgacagcataatgccgcgttcgcctacttctgtatcaaactgattcggcagctcctttataaaattgagcgcatatgccatctccgcggctttttcgatctcagcatccgtcacatctcgttctaacccgtagcaaatattttctctgattgacccggacattaacgggctttcctgcgatacatacccgatatgctccctccacgattcaagcgagtaagtatcgaccggctcgtcccccagtcgaatggtccctgcagtcggagtataaaaacgttcaagcagcttaaacagcgtcgttttccccccgccgctcggaccgacaatagctgtgactttacctgcttcaatgacggcgctgatttcttttaaaatcagctgatcaggcttgtatccaaaagacacgcgatcaagctgaatagggagatgcgcattttcaatttgttttcctgtcactgtatcttcttcttcctctgctaaaatctcaatcattcgttctgttgcaccgattgatttttgcagctgtgtgaaaaacgttgtaatctggcccatcggcattataatttgaaacaaatataaaataaaagccacgagcgctcccgccgtgagttcgcctgaagatacctgcatgccgccatatccgatcactgcgacaagcgctgccattagcacgagtgagataagcggaccgacaagtgattgaaccttagcttctcgaacgccaagcttaaataatgatgaaatccctgttttcccgcggccgtattcgacatcctccgcatttgaagctttgacaagtctgatttccgggagaatttgattcagcaggcctgtaaaacgggctgtttcatcttgtgtttcccgtgaaatggagaacattttccgtccaatcggcaccaaaataagagcggccagcggaacgaccactaacacaagcagtgtcagcttccagttcataataaacaagattgtcaatgatccaatgacagaaatgatgcctgtaataaatccgctgatatgggttgtaatcaattctttgaccaccatcgtatcgttcgttacacggctgactgtttctccggaagcatttgtatcgaaataagagacaggcagcttaattaatttcttccataataactcccgcagcccggaaatgattttttgtccattatagttaagcgcataggtggcataagcgcttaaacccgcctgaacgaaaaacaccagcgcgatcaaaccgatttgcgtgcctgacagatttgacatagaaaaaccatcgacaagctgcttcgttaataatggaatgagcaggctgaccagcgtggttactacactgagggcaagcgcaaaggcgagctttccataagaaggattggtccgtcttactaaggcaaaaaagggtttcaatttacttttagatttttgtttcttggttggcatatattttcctcctgtttcagcgttcagaaaggtgaaaagtcatagcaaaaggatgatttttactctttctcaatcatatcaatggagaaagactttttcagtatatttttgccgtgatcaaaataaaaatctcccactcattgtttgaataggagatttttgtgttagacatctttcactggcttcttttttctgtaagtcaatgttacatcctgctgtcgcaggtcttctattatcattttgtaccgatcaacttttgcggtatgttcttcttttatcatctgaagggcagcttttcgtttttcgctattagactcaagctctttttttattttttttacaatcaaccctttttgccctttgatttcctcttttaatgaagactcaaatttctttgtcaggctgagaaagtcgttgatcggttgattgagggtgcccgctttccccttcatttcatcttgggtaagaaacatataggtcgttgatacaatttctgtttcactttctgaaaataaggaagtcactcttcatattcctcctaagactgaaaatcaaataactgagaaatcatttcttctttttcaaacagcttttcaatactctcgcggatatttttgataaaatctcttttttctgttgtctgtttttttaattcagcaacaattccatcattagcaggaagcgcacctgtgtggaatgattcatgaactgagattttctccaatttatcgaatgtgtggctgaaaccagctgcaagccggaattgaagatcgaaggcataatgcgaagggttttcttccatatgatgaatagccgtgatgatcgcctgctttttgtctatgaagtcttcatcgatttcctgactgtaaaccttctggtacttagaaatcgcatcttccatatcttcaacgattttcataccgttttgatagattctgacagcggatgagagattgacttgaatcgtttctcccgagccactcttccctgtaaaataaatatcggagcctttatagctgaagcctttttcctttgacaaggcgttgagcatttgaacgatgctgtggccgtcgacgataagttttagtgcgtcttttgtttctgtgtcgagtgttttcaatgaggacagaattgattttacatagtccactatttcaccaacgtcttttaaagcttgcataaattggccatattttagatggtctatgaaatgttcgtaccgtgactctatgcctcgcatactcgcattaatattcgttaattcttttttgatgactttcttttgcgtttcatcaatataaccattttcagctaactgatctacgaccggtccgctgtttctcaacaaggtatgaagaaaacctaaaaacgacggcagttcctcttttattcggccatacatttgcttaacatcatcaaaatgctcatataggacacttactttctttaaagcgccgtctgtgtttttcactttttcaatcaggtctatgtctatcccgctggctgcctttataaaaccgttcaagccgtctttttcatagtcatccttatatttttgaaggaatttttgaattgacctcacatcttcgtcaggaaccccatccataatgtttcggatgccttttacacttgtatttgtatctgccatcttcacatcaccgaatgtaataaaatcggccttgccgctgactccatacagcgggtcatcttttgagatgcgctgagtgatgtttgttgttacgcctttgtcttcataatatttttggatttctttttttaacttttctggcgggatggaatctatatcttcatatttataactaaatttcctaataacatatctatataaactttcatcagtttcaagtaattgatcaatattgacttgagctccatttaccccataaacttcatcatattctccatcaatcaattgcaccataacttggttattatttgcaagtgaatgtcctaaggcgaatgtttttaaatcctcagagttacctgctgctttctttgctttgttagtaaactcctttgtagcctcatactgactatgatcaattcctaaaaaaagaccaaaaaagttatatgaccaatccttattatcggcactaccttctgaaataatctgaagctgatcaatatgttttttctcatctattatatggattgccgttccatcgtaacctgattctctggtcgaactttgtatacttgtattctgatttacaagttcattggaggtgtaaatttcaattttcatattctcaggaagatcgtggtgggtttcctctttataaattctgcgtatatctgcttcgaaatccttcttagctttcttaacttcactcgcaatagttgaggcaaacttttgtttatagtcatattctaaatcaattaaccttaactttacgttctcattctcaaatacatttttatttcccatcttatttctcctttttatctattaaaaaggtgatagaattaattaatttctcaactttatttttagccttttcttcatctaaggagcatggttgattttcatttttgcatccaagggtaaaggcgtattctactcctaggttatcttcctctgtagacttaacatatccaaaataactgtatgaataattatattttctatcaatatcgtcaaagatgtcttttttcttggcagtgtaaatatccgttttctttttgctgctttttttgtattcgcctttataatcattttttccactaacaatatctagcattgtcttaggttcattcgcaaaactttcttctttgtaatatgttacatggccatcaaacattacattggtgtctttatcataactattaaatccaatactttctttgtttttcccggttaacgatgatcttcttgatagatactttccatcctccggaaacaacatcctaaaccctttcagcttagattccagcaaataatatcctggttcctcttcttttgttgacaccatgtactctctcgttttctcgtcctgaaacgcaggtacttgaggcagatccttgggatccatgtcttttggttttaccgcttctgttttattgtcatttgtgctgtttttatcattgtcattcatactgcatcctcctgtcagggcaagtaataagctgaagcaaataaagatgatctttttcattacgaacctccacgggttttgtgagaatagtattctatttttatatcaaaaataattctattgacctggttaagagatgattatttcatcctttttcatgttacatcatggcggaatttggataaataggaaatgagactcggttttgatctccttttattaactaatcatatataacacccaatataaatctaaatacctattacttttttcacaaaacaaaaagagccgtatcatccggctctttactcttcaatctcagaatggcgttttttcaatacgtcaagcacatcatccagcggcagggattgttctctgagcaggacaagcaggtgatacagcaggtctgccgcttcccatttgagttcctcatgatcccggtttttcgcggcgatgatgacttcggatgcttcttctccgacttttttcaaaatcttatcgacgccttcacggaagaggtacgtggtgtaagctccttcaggcatttccgcttggcgttccgcgatcacccgctccagttcgttcatgatgccgaatcggtccgcggcctgttcttctgtttgttcctttgtaaaacagctgtagctgccagtgtggcatgccgggcctgacggttctacgagtacgagcagcgcgtcttgatcgcagtcataccggatacctttgacggcttgcgtgttccctgaggtttctcctttatgccataacgcttggcgtgagcggctgtaaaaccatgtttccttcgtttccagcgttttttcgtacgattccttgttcatatacgcaagtgtcagcacttctttgcttgccgcatcctgcacgatagcaggaattaatccgtcctcgttaaaacgcagttcatctgcctgtttcatctcacattcaccccgtactctttcaagtatgatttcacttctttaatcgatgtttctttataatgaaaaattgaggcggccagcgcggcgtcggcttctccttttgtaaaagcctcaagcatatgctgtgcgtttcccgcgcctcccgaagcgataacagggacggggacagcttcggaaacaagctttgtcagcgtgtggtcgaaaccttttttctcaccgtcggagtccatgcttgtcagcaatatttctcctgccccgcgtttgacgccttcttttgcccacgcggtgacctcccaatctgttttctttctgccgccgtgcgtatagaccttatatgtgtcagattctttgtcatacttggcatcaatggcaagaacgatgcattgcgaaccgaaaaactcggctccttctgcaatcagctcagggcggagaacagctgccgtgttcaccgacactttgtccgctccggcacgcagtatcgttttcatatcactgagctgattgatgccgccgccgactgtaaacggaatggcaagcttcgcggcaacctgctccacaacgtcaaccatcgttttgcgtccttcatgcgaggcagaaatatcaagaaaaacgagttcatccgcgccttcccggtcgtacacttccgccagttcaactgggtcaccggcatccttcaattcgagaaattgaattcctttgacaacgcgtccttctttgacatcaaggcatggaataatccgttttgtgatcatttgcgcttcaccctttcaagcgcctcacacagcgtaaactgattggtatacagcgcttttccgatgatcgctccagagacgccgtccgcctcagagcgggcgagagcttcgagatccgcgacggagctgactccgccggaagcgatcaccgatttccccgtttccttagcaagctcgaccgtgcttttaacattggggcctgacagcattccgtctgtcgcgatgtcagtaaaaataaagacttccgcaccttcattggctagctctttgcccagttcagttgccttaagggttgatgtttccagccatccctctgttgaaacaaaaccgtttctcgcatccagtccgattgcaattttctcgccatattgtttcagcatttttttgacaaacggagggttagaaactgctgagcttcccaggatcacccgatcgactcctgctgataaatattcatagacgtcattttcggaacggatcccgccaccgatttcgactttcaggttcagcttttgcgtaatctcaatcacatggcggtcattcactcttttcccttctttggccccgtcgagatcaacgagatggatccattcggcaccctctttcgcaaataactcagccatgtcgtacggtgaatcgccatatatcgtttccttattataatccccttgaacaaggcggacacatttgccgtttctcatatcaattgccggatataatgtaaaagcactcattttttcaccttctgttctgctgccattttcgtaaattgagttaaaatagacattccgaccgtgctgcttttttccggatgaaattgggcgccgaagacgtttctttttccgactacagcaggcactcgtacaccataatcggcgcttgccagaagcgcgttctcctccatcccgtcaatgtaataggaatgaacgaagtaagcgtagccttgttctgtttcagacagcagcggagattcgttatgaaaggaaaggaggttccagcccatatgcggaaccttcagcttgtttcctttttcatcttctgctttcagcctgactgcttttccttttaacagcccgagtcctgaagcggtgccgttttcttcgctttcttcaaataaaagctgcatgccgaggcagatcccgagaagcagccttccctctgagaccatatcgtgaatcaattgatcaagcttcgtgtagcgcaaattgtccatcgcgtctccaaatgaaccaactcccggcaaaatgaaggcatcagcttctttcagctcctccggcttttcagaaacaaaatacggcacgccgacacgttcaagcgcctttgagacactgtataaattccccattccgtaatctatcacgccgatcatttacagcatccctttcgttgacggtattcctttaactcgcggatcgatcgttgtcgcttcatcaagcgcacgtcccagtgctttaaaaacggcttcaatcatgtggtgggtgtttgtgccataatgaacgatgacgtgcaggttcattcgagcttcgagcgccagcttccacaaaaattcatgtacaagctccgtatcgaaagttccgactttagcagccgggaaatcagcgcgcatttctaagtgcggccggttgcttaaatcaatcacaacttgagcaagtgcctcatccatcggcacaaacgccgatccgtagcgtttgattccttttttatcgcccaacgctttgagcagcgcctgccctaagcagatgccgatatcttcagtcgtgtggtgatcatctatatcaacatcgccttttgcgttaatggaaagatcgaattggccgtgtttcgtgaataaatccaacatatgtgtcataaacggcacatctgttttgatatccgcttgtcccccgccgtctattgtaaatgccagttcaatatctgtttcgtttgttttcctgacgcgttccgcttttctcatttagaaatcctccgttctctcgcttcaattgatctggcatgggcttctaacccttccagtctggcaaaagccgcgatgctttcggcatgttcttcaaaggctgattgactgtaagaaataatgctcgatttcttttgaaaatcagttacgtttaatggacttgaaaatctggctgttccgtttgtcggaagcacatggttcggtccggcaaaataatcaccgacaggctcagggctgtatctgcctaagaaaattgcacccgcatgtttgatactgccaagcaaagcttccggagactgtgttatgatttctaaatgctctggcgcgagtgtattgacagtattaatcgcttccaccattgtttccgccacatatatacaaccgtaatctctcactgaagcttccgctatttctcttcgcggcaaggttttcagctgcttactcacctcggctgaaaccgcctcggccagcgccatggaatctgtgacaaacacacatgagctgagcttatcgtgttccgcctgtgacagcagatcggctgcaatttcgctcggaatcgctgtttcatcagccagcacgacgatttcactaggtccggcaatcatatcgatatcgacatcgccgaacacttctcgtttggcaagcgcgacataaatgttgcccggacccgtgattttatccaccggttcaatggtttctgttccgtatgctaacgccgcaatcgcctgagcgccgcccattttgtaaatatcttttatgcccagctcggctgcagcaaccaaaactccaggagacagcagaccgtctttttccggaggcgtgacgagaacgattctttcaacgcccgctacgagcgccggaatcacattcatcaaaacagatgaagggtatgcggccgttccccccggcacatatacaccggcggaatccagcgccgtcactttctgccccagcattgtgccgtcctttctgtgataaaaccaggaggattgcagctgtctttcgtgatattccctaatattttcgattgcctgcctaatcacctgaagaagacgtgaatccagtgaggtgtatgcctcctcaaattcttcttttgtgaccagcggactgtctatttcgatgccgtcaaatttcgccgtgtagctgcgaaccgcctgatcaccgtttgctttaacatcttctataatggaccggaccgtctttctttgctcttccgttccggcatcgatggaacgcttgagagaaagccgttccgctccgctgatggttttgatcttcattttgccgtctctccttccacaacgagagataggcgggatgccatttcgtcaatcacatcgtctttcatgcgatagcttaccgggttgacaataaagcgagaggtaatgtcacaaatgtgctccgtttcaacaagcccattttctttcagcgtctgtcctgtggaaacaatgtccactatccgatctgcaagcccaatgagcggagccagttcaattgaaccgttgagcttaataatctcgacttgttctccctgctctctgaaataactggaagccacattcggatactttgtcgcgattcttggcgctactccgctccagtctgtattcggaagtccggcgacagctaagtggcatttgctgatttttaaatccagtacctcatacacgtcgcgttcctcctccagcatgacatccttgcccgcaattccgacgtctgccacgccatgctccacatacgtagttacgtccatcggcttcgctaatatgaaacgaagattttcctccggcacatcgatgatcagttttctcgaatcttcaaactcctcagggagcctgtagcctgcctgcctcagcagccctgccgcttcttcaaatatccggccctttggcatcgccattgtgagtaacttacccattttgctcttcctttctggcaccgataaaataagtgacgtttgcaaaagattttgtcatctggtcgatattttctattcccgataaatcttgaagaaccactttgttccctttcatgcgttcttcattcgcataagcgatggcttgcgcccgctgctctttgctgaaaataacagcgtctatatcacaaggttcttctttcatatgaagggcttcaatcagccggtcgatccgaagcccgaagcctgttgccggtgcaggtgaatcaaaatggcccagcagcttgttgtaacggccgccgcttccaatgacaaaaccgacattctcggcgtacacttcaaataaaatccctgtgtaatagctcatgtggctgaccatattcagatccaggcggacattttccgtacatccgtaatcctcaagaatgtcccacagcgccttcagctcatcaaccacgctttttccttgcgcagaatcgacgatttcctcggcacgtccgcatacttctataccgccccgcagttcaaggagctcaagcagcctgcttttatcaatggaggaaagcgggagagacttgacatgctctctgtaaccgacgtagttcttttcatataagaacctccgcagcacatcagctcgttcaacgttcccgagcacctcaacaaacaaagcatccgcaatgccggcatggccaatggcaattttaaaggatgccagcccagcgtttttcaatgccccgacgactaaagcaatgacctccgcatccgcgctcgttgtgccgtcaccgattaactccactccgacctgctcgaactcagccggacgtccgccttcacgctcctgagccctgaatacatttgccgcatagccgactcttagcggatgaccgtgtttcagaagcttcgatgccgccacccttgcaatcggccccgtcatatccgggcgaagcaccaatgtcttgccgtcctgatcaagtagcttaaacagctgctgctcttcaattgctgactggacgccaaccgtatcgtaaaactccagtgtcggcgtttccataaattgatatccccatttatcaatcaaatcggttaacgatcgtctcaccttttttttcgtttcgtataaaccgggcagtgtatctctcatgccgtgcggtttttcaaacataaacatcaacccgagcacctccgctgttatcttatgaaggaaaattccgaatcctttagttcgctaatatgataatatgttagcagatgaaagaatgaaaatcaacgcttaacttcagtaaggatatttttagttcaaatatccttctcctcattatgaaaaaatcatgaataatgtattaaaggtacgtaatatctcaaattctttatgtttggcatgctataatacaaatcaaatagagaacaaggagataaagatgaaaacactgcgaactctatgtgtcctgatgattctttcaggcgttatttttttcggacttaaaatagatgcaaaagatatagatattccttttttgaacagccttaaaaaagtggtttctgatagcgatacagatacaggtgcgaatagcaaaaaggagctgaagggaagcgcaaaaccgctggatgtcatcctttacaatcaaatggacgcaccccggctctataacggctgtgaagtaacaagccttgcgatggtgctgaattacgcaggatacgacgtgacaaaaaacaccctggcaaatcaggttgccacagtgcctttgacatacagcagcggattaaagggtgatccgaatgacggatttgtcggggatatggcgaatggccctggtctcggtgtctaccatcgaccgatctatcagctggcgaaaacctatgcgggagacaaagtgtctgatctgactggaaaaagcatttctgctgtttatgaacagcttgaaaaaggcaatccagtttgggttattacgacagccaactttacgccagttgacaacatgcagacatggaaaacaccaaacggaacgatagagattacgtacagcgaacacagcgtcgccgttacgggatatgatgataaatatgtgtatctcaatgatccgtatggctataaaaacagaaaaaccgatagaacaagctttgaaaaagcgtggaaacaaatgggcagccaggccatagttattcaaaagtaaacgcctgaaagccgcactatgctctatcctgagcaaatacgacaatattcatgctttttgtttcaatcggtaagatcgattcattttccatttatcatccagaattatctttactttcaggctgtctgtttttatgattaaagcagattcagccttgccccgatctatgtgagagaagccggtgcaagtcgctgacgcttctcttgcaaaaaatgaaagatatccggggaggatttatcattgaaaaaattcgtgtctatcctatttatgttcggtttggttatggggttcagccagtttcagtcatcaaccgcttttgcagcagacaaagtggtgcacgaaacaattatcgtaccaaaaaatacaacatatgacgggaaaggacagcggtttgtggcagggaaagaattaggcgacggaagccagtcagaaaaccaagaccctgtttttcgtgtggaggatggtgcaaccctgaaaaatgtggtgcttggcgcccctgccgctgatggagtacacacttatggaaacgttaacattcagaatgtgaaatgggaagatgttggtgaggatgcgttaacggtgaagaaggaaggaaaagtgacgatcgacggcggttctgctcaaaaagcgtcagataagatattccaaatcaataaagccagtacattcacagtgaaaaacttcacggcggacaatggcggaaagttcataagacagcttggcggttcaaccttccacgttgatgtgatcatcgataagtgcaccatcacaaacatgaaggaagcgatattccggacggacagcaaaacaagcacggtcagaatgacaaatacacgctactctaatgtcggtcaaaaatggattggtgttcagcatatttacgaaaacaacaacactcaattttaaccaaaaaagtccgctgatgttattcagcggactttttcaatctttcttgcatttcttccttcgtatagatgatcctcatcggatttccgccgacaaatgcgccggcaggcacgtctttatggacaagtgttccggcggacacaactgcgccatctcctattttcaccccgggcagaatggtcgtgttggcaccaatcatcacttcgtctccgatcagaactgtgccgatccggtattcgtgaatcaaatactcatgggccagaatggtcgtattgtacccgatgattgtatttgttccgactgagatcttttccggaaacatgatatctggcatcaccatgagggcaaaggatgtctgatttccaaccttcatccgcagaaatgtacggtacagccagtttttcatccctataaacggcgtatatctcgcaatttgaatgacaatgaaatttttgacgacctttaaaaaaggtaccgtttgatagacatgccacagtgagttggcccccgagaccggatgacgatctgtttttctcacagattacttcactccaacgatttgtaatagatcactcattttctcaagcataaaatcaggctcatgcttcgccagcatttccggccctttaatcgtccatgcgactcctgccgtttttgtaccggcgtttttgcctgccagcacatcgtggtaattatctccgaccataatggcttcctcgggcttgcttcctaactgtttcagcgctaacagcacaggctcgggatcaggctttgcatttgtcacatcatcaagggtgacaactgtttcaaagaattcgccgattcccgtgagcttgaggcccatattgacagtatctcttaattttgttgtcacaattcctaatgtaaagccggctttttttaatgcatccagggtctcatataccgtttcatattcagtcacgagtgaatcatgcatgtcatgattgtacgctctgtacatagcgatcatatcctcgcatttatcagggtccatcgaagagaacgtttcaaaaagagacggcccgataaatgcaaggacatcttctcgtttatacttgctcggataataatgctccagtgtatgcaaaaaggacgcgataattaattcattcgtattaataagcgttccgtctaaatcaaacagaatcgtcgttacttgtttgtcactcatattgcttcctttccaaccgctgagggtttccattttttccacgtgtgcgcaatagccattgtcagcagaactgctgtggtgacacgaatcaaaagaagcggccagactggtatgccgagcggaataaagacaagtgtatcttccacgaccgcgtggcaggcaacgagaaatataaatgccaatgtcatatcccgcttgctcacgccgtcatcctcgacagctttgatcatgacacccgctccgtaggccagaccaatcgtcagtcccgccaccatcgtcatagacgtatttttattcatgccaagcagctgcgtaaacggcgacagccacctggaaaaccgatgcagccagcctaaatctcttaaaaactggatgataatcatcagcgggatcactattgccgccagctgcaaaacaccaagtccggctttcgttaatgcttctgccaacattcctagccagctgtctggcgccgcgctcttcgcagcgataaaaccgtactgcgccgtttcctttccgccatgccaaatgaggttgatgacgatggctgacacagcggccaaaccgatgcgcacggccaatatgacgccaattctgataccaacctttgcggcaactgtcgattcgataatcaagttatgacagaaagaaagcataacagctaaaataaagacttctttcacagataaatccaatgttaaaatcccggcaattcccgcatacagattcagcatatttcccagtacaagcggaatggccgcttcaccagaaagcccgaagagacccattaccggtgtgatcagccgtacaagccaatccatgacaggggtatgctgaagcaaagtgaccaatagcgttaccgggaaaatcactttacccagcgtccatgttgtttgaaaacctgctgcaagaccggccagaaagatcttcttcatccctcatcccctttgttgacgtctactccgcgtaccgctccttcgaatatcccttgacgcgtctgaagatgatggctgccacagccaaaacaatcaatacgattgaaatcacctgagcgatgcgaagtgaatcagtcagcattaagctgtcagtccgcattccttcaataaagtatcttccgattgaataccaaatgatatagatcaagaacatctcgcctctacgcaaattcactctgcgcagcagcagtaaaacaatgacgccgacaaagctccatagtgattcatataaaaaagtaggatgataatattgcccattgatatacatttgattgatgataaattcaggcaggtgcaggttttctaaaaaggctctgctgacagcctcgccgtgcgcttcctgattcatgaagttcccccagcgcccgatcgcctggccgagcaaaatgctgggcgcggcaatgtccgcaagcttccagaacgaaagttttttcactctcgaaaacacataacccgttaaaatggcgccgattaatccgccatgaatggcaatgccgcccttccaaatcttaatgatttctcccggatgtgccgcataatagtcccattcaaaggcaacgtaataaattcgcgcgcaaataatcgcaattggaatggcaaacaggacaagatcaataaacgtatctttctgcagcccccgtttttcactttccctcatcgcaatccacagcccgagcaaagcaccgagaccgataatgattccgtaccaatggacggctaacggccccagctgaaatgctatcggattgagtggttctatcgcttcattcatttaacgccaactcctattcttcttgttcaccgtcttcaatgacgtccgccagcttgttggtaaattgttcagcggcattcagccccatccgcttcaatctgaagttcattgctgccacttcgatgatgactgcaagatttcggcctgggcggacgggaatcgtcagttttgtaatttctgtatcaatgattttcatggtctcttcctcaagtccgagccggtcgtattgcttgccctgctcccagagttcaagattcatgacaatcgtgattcgtttattgcttctgaccgcgccagcgccaaatagcgtcatcacattgataatgccaaggcccctgatctcaagaaggtgctcaattaattccggagcgtttcccacaagagtatcctgatcctcctgccgtatttcaacgcaatcatcggcaacaaggcgatgccctcttttcacaagctccagcgctgtttcgctttttccgacgccgctctttcctgtgatcagcacgccgacaccatatatatcgactagaacgccatgaattgctgtggtaggcgccagcctgctctcaaggaagttggttaaacggcttgacagtcttgtcgttttcagcggcgatctgaggacaggcaccccatttttctcggaggcgtcaatcagctcctgcgggatgggcatatctctagaaagaataatagctggtgttacatcagtgcacagagaatccattcgctgttttttctcctcttcaggaagctgttcaaagaaagaaagctctgtttttccgagaagctgcacgcgctctctcgggtaatatgtaaaatatccggcaatttcaatgcctggtcttgataggtcactcattgtaatcgggcggttaattccttcttctccgctgattaattccaaattgaactgttccattacgtcttttgtgcgaacctttgccacgatatgttcctcctgttccgggctgccccgagcttgctcacaatactttcattttatcactttcaggcttgaacctaaaacagattttataaaaggcgggaaaacacctcagctggtctagatcactagtctgaaaaagagtaaaataaaggtattcaaattccagaaaggcggatcatctatggcagagagtcttcttatcaaagacattgcgatcgtgacagaaaatgaagtaatcaaaaacggctatgtcggaatcaatgacggaaaaatcagcacagtctcaacagaacggcccaaggagtcatattcaaaagaaattcaagcacctgcgaattccgttttgcttcccggcatgattgacattcatatccacggcggctatggtgcagatacgatggatgcaagcttttctgcgctcgacatcatgtcgtcaagactgcccgaagaaggcacgacgagctttttagccacaacgattacccaagagcatgggaacatttctcaagctttggtgaacgcaagagagtggaaagcggctgaagagtcctctttattaggtgcagaactgctcggcattcatttagagggcccctttgtttcgcttaaaagagccggagcgcagccaaaggagtggattaggccttcggatgttgcgcttttcaaaaagtggcagcaggaggcaggcggactgatcaaaattgttacacttgcgccggaggaggatcagcattttgaactgatccgccatttgaaagacgaatcgattatcgcatccatggggcacacggatgccgattccgcattgctgtcggatgccgcaaaagcaggggcgagccatatgacccatctgtacaacgcgatgagcccgtttcatcaccgagagcccggagtgatcggaacggcgctggcccatgatgggtttgtgacagagcttatcgccgatagcattcactcccaccctttagctgcaaagcttgcttttttggcgaaaggcagcagcaagctcattttaattaccgattccatgagggcaaaaggcctgaaagacggcgtatatgagttcggcggccaaagtgtgacggtaagaggacgaacagctcttctttcagacggaacccttgccggttcgatcctcaaaatgaacgaaggcgcacggcatatgcgtgagtttacaaattgctcttggacggatatagctaatataacttctgcaaacgcggccaaacagctgggcatctttgaccgaaaaggcagtgtgactgtgggaaaagatgcagatttggtgattgtcagcagtgattgcgaggtgattctcaccatttgccgcggaaacattgcatttatatccaaggaggctgaccagatatgaaagtaatggaatgtcaaacgtatgaagagctaagccaaaaagcagccagaataacggcagatacaatcaaagaaaaacctgatgccgttctcgggttagcgacgggcggcacaccggaaggcacttatcgcgagctgatccgcctgcaccaaactgagaatctctcatttcaaaacgtcactacagttaatttggatgagtacgccagactttcaagcaatgacccgaacagctatcacttctatatgaatgaccgtttatttcagcatatcgacagcaagcctagccggcattttattccgaatggaaatgcagacgatttggaagccgaatgcagacggtatgaacagctagtcgagtccctcggcggcactgacattcagcttctcggcatcggccgaaacggacacatcggctttaacgaaccgggaacctctttcaagtcgcgaactcatgttgtgacattaaatgagcaaacccgccaagcgaatgccagatattttccttccatagacagcgttccgaaaaaagcactgacaatgggaattcgaacgattctctcaagcaaacgcattctgctgctcatttctggaaaaagcaaagcggaagctgttcgtaagctgttagaaggaaacataagcgaagattttcccgcatctgctttgcacctgcattccgatgttacggttttgattgatcgtgaagccgagtcattaagaccttgaaaggaacatgctgacttatgaatatcaataaacaatcgcctattccgatttactatcagattatggagcaattaaaaacccaaattaagaacggagagctgcagccggatatgcctcttccttccgagcgcgaatatgccgaacaattcgggatcagccggatgacagttcgccaggcgctttctaatttagttaatgaaggcttgctctatcgcctgaaaggacggggcacctttgtcagcaagccaaaaatggaacaagcacttcaagggctgacaagctttaccgaggatatgaaaagccgcgggatgacaccgggcagcaggctcattgattatcagcttattgattcaactgaggagctcgcggctatattaggctgcgggcacccctcctctatccataaaatcactcgggtgcggctggcaaatgatattccaatggcgattgagtcctcacatattccgtttgagcttgcgggtgaattgaacgaatcgcattttcagtcgtcgatctatgatcatattgaaaggtacaacagcataccgatttcccgtgcaaaacaggagcttgagccaagcgctgccaccacggaagaagcgaacattcttggtattcaaaagggagcgccggtcctattaatcaaacgaacaacatatctgcagaacggaacttcttttgagcatgcaaaatctgtatacagaggcgaccgttatacatttgtccactatatggatcgtctttcataaaaaaaaagcctccaaccctttttaaggattggagacatggcgaaaatcaaactggtctggtgctggacgatatgtctcttttttcgtcttgaacttccagatcggtgatttcgttttgccattaaaactgtcttccactataatgtaccaataataaacagactgcggttcaagatgatcccagcggaattcagctgtatccccgctcttcacttgctcccgttttccgagctcttcattggtatatacgttacattcaaaataatcggtttccacctttttgattcttggcttcaaatcaagcgaaagggaaaattcatccttgttgccataggtatccgtatcatagtaattcttatcctttacatacggagaatacgtcgatacgtgcaccatgtcattggcctggtcaaattgaagcaaacgcaaatacccttgaccgccttctggcccgccctgataatcggccagcatttgatgcacaagacgatccggcttcccatcaccatcatcatccagctcatctgtttttctcatcgcactatgataatgcccgctcaataccatcacgacattcgggttcggctttacgatttctttgaatattttctctccgattgggcttctgtttccgctgaccagcaaatactcatgaaaagctaaaatggccatccggtcagggtgtttcttcagcacctgattcatccacgcgatgtcttcatccgtaatgccccatcccatgtacagcatgatataatcattgccgttgctagaaatcaggtcataatgtccgcggttatttttataggaaccgccataatgcaattttttatcaaaacgatcgctgccaaaatatttgccaaacaccctgtaggagccgtccttatgtccgacatcgtgattgccggccagcactccgtaaggaattccgctcttatccagaacggacattgaccgatcagcgtttttccactgtctgatatcggcggaatcatctacaatatcacccgtgtggaacacatatttgatattgagctgcttttgattatcttttatccattcggtctgtttatcaaaaatatgcggatagctttcggcgtaatactgtgtatcagacatccagacaaatgtgtacatatccttcgcaggaggaatttcatcctgtacaatcacattcattttcgactcccgtacaaaatcggcggcaatcacagacgctttcagcgtaaacggtttgtcatccttcgcgacgaagctgtcaacaggctgccattcgtttgtccgataattccaagcatacatcgtcacctttctccccggcaaagaactgcccttccagaccgcttctgccagatcattctcatcaattgatggatcaaccgtcacttcaaagcgatgataagggaaaagctctttgttttctgtcgatactgtttttccatcagcagctgatacccgctccaattctttattcgtaaatggggtctccctttccggcacaaagcttttcggcggttcagtcagtgacgcgtgcttaaatattttcacatgattgcgcgctgtatattgaaatcccctataaaaaccaacatccatggcgtcattcgtcggatctttcacccgtacagaaagcttggccttatgcgtgtcggcttcgctgtctataacctccggctggtccggatgctctcgttcggttttaaatatcctctcaatcactgttttattgcccgcgagatccgttgctgtcacttttagagaatgttttcccggcaaaaggtcagaagatgatgtatgatatgggagtgtaatgctttctccatctaaagacgcttccgcttcctcaattttgctccatttatcatacatatccgcctgcaggataaggtttcctttatacgtttgcccctcggtgatattcggctcaatgtgaggtcctgaattatctacccgtacaaccaggctgacattttccttgccgtcgcttgcttgaatatggtgagcgccttcagaaagctttgatgtatcccactccagcagctgtgatgtaaatagtccgtcaggcagattgaactgaaattgccagcttttattcgagcgctgattatcgccaataaagagttccttctcaggagacaccctctgatctctgatcaccgttccatccgataacaccaatcgggcgtttttgactaagaagtcatcacggttttcagccgtatcaaacggagacaccttcgaacctgaacgtatcgtaatacgctgcagctgcttccctttccgaagcagtgtctctggcaatggaacagaataggtgcggtatttatttgttgtatcatcgaacaccttcagcactttgccttccatcgttaccgcgtttttaaaataaaggttcgttttcctcgtatcgaatgcaaaatatacttctttttccatcgcgggctctgtcacttgttttttcccgtcaatccacagcttaatgctgtcagctcgcccttctgtcgtggctttgagaaattgagttcccgacagcgtgtctctgttttcaatattcatccgcagaccgtgcgccttgcttgtttgtttaatatcaatcattttgaccggcgttctcgcttcattgatcccgtccccggccgccacataatactctagctgatccttcccgatcaattcaggcgaatacacaatataatggaagagattatcgttgcggtctttttcagcaagaattcgcttaaacggtttgttctcatccgtccggtagtaaaaggccgctgttttcactaggcttcggtcccgtatgtcagcccgcagctcaatgctttcagcagggcggacaggcttgcggtcagtccaatcctcaatgaccggcttttctttatcgagcttgattttccgtttctgctcgggcacctgtgcctgtaatacggttccgggagacggattcttttctccgattgaaatgttcagaagttctgcggttccgttcaacggatacttataaagcactgatgacagccggcgcagcgcatgtttccgataatgcgcaaccgaaatgtcctttcctgtattcgttgatatcacaacggcccgcggcctcgtattggccataccctctgtctcgtctatcaccgcgagattttttccttccgttaattgtgtctggtaatatcgattgaaatcctccgccgtcaattctggatgcccggcaggcttcagccagacgacaaacgtttcgccggatggtatcaagatcctttcatcaggtctccaaatcagatcggagtcaggcccttcttttgggtagcggtaacggatatggtagtctttaaaatcaatcgttctgtcagtcgtattaaaaatctcaataaattcataaccgtctgcgcgtcctatattcttcgtatcaaccgccagctctgtgatcagaagctccggaatatgggcaaggtcagcctggtatccttcaagcttcagtttcttcgtctccgactcaacccgctgcttcccattcgacatcacaatgtaatactcaagctcgctgttccaaatcaaacgtttcggaatttgtgccaaaaacttgcggaccgctccgggggtcgggtccatcggcaccattttgtagcccagctcattactttgtttataaaaaagaaaggcggaaaatgcttgatacgaattatcgcgaacttgagcctcaatcattagattgcttctcatttcagctttcacatcaatttgaggaggattttcaagcaagggtatgtaatgaggcgtctgaaatggttcctgctgaacaacaggaaaagctttcgattcatgatggccgccagacaaaacggaaagaaaagacaataatatagaagcaataaccgtgtatttcctcatcaaagcacctcccttttcatgtattttgcgtctgaacagggaagcttatgagttcatttttgtgcataaagaacaaaaaaacgtctgtctcttgaaaattccactattacctagtaaactaaggatagttaaccagttaacaattaaatcagagaggcaaattgatggacaacagcattcatgatgaattatttcaagctatacaacaattcgcattaaaaagggataaacgcgtctggcaaaaggtgcagataccatccattggcatatcctcacaacatcacgatcacctcaaaaaagactggactttgacccagcttcacattgtttcctgcatacataccagccaaaatgtgaacaacagcttcttagcatcccgtttacacatctcaaaagccgctgtttcaaaagcggttcatgctttgttgaaacacaatatcattacagtgacaaaaaagcctggcaacaaaaaagaaattttttatacgctaactgatagcggcaaagaactggcggggttacatgaacggcttcatcaaaaagcaaaggagcaatacaaacagctcttcaatgaattttcaattgatgagttgaaaacagtgactgcgtttattaacttgtggatcaagcatatgtaaaaaagcctcacccgcacgggagagacctttccatattattaagccctgtcaaatacaatatgaagtgagacgggtccgcgtgtatacagaccggactcagcataacaaaaatcttcctctaatctgatattccgcatcttatccagcacaatattagctacaatttcgatttcggttttggcaaaagctgctcctacacagttatgaatgccggatccgaaagcgagatgccgggcggcgccgctaaaagcgctcttgatgccaagatcttcccgatgaatattaaacacgtcaggctgttcaaatgcttcagggtcccggttagccgcaccgatcatacaaaaaacaatcgtatcttttttgatttccataccgccgaccactgtatcttgggacagctgccgcggaatcagctgaaccggcggtttataacgcaatgtctccgcaatggctctcggaactaacgaacggtcagccaaaacatcattcatctgctcaggattgttgagcaaatggtagatcatcagtgccagcgtcttatcagccggttccgttgcggctaacagcacattaagaatcagtgcgagtatatccttgtccgacatcgccatgccttcatattcagaagtacataggatggaaattaaatctgatcccggattgacgcgacgttcttcaatgaccggcatcaagtattgggaaagctgttcgctgcaccataacgaatgtgcccgcgcttcaggagattgagagatactcgtgataaaatcggcaactccgctatgccactcagagattttttcatggtctcttttatccagcccgagcatgtccatcgtgacgcacaccgcaaacgtctttccaaaatcattgacgagatcaattttccctctttcaagataaggcgctaacaagttttctgcattttgtttaatcaatggagacagatgatccagtgcgtcaccgatgaagcttctcactacaattcttcttttggcagagtgttcttttccatgcatttgggccagcacagggcctcgcattactggttcggcacgctcaacaagtgatttcgtcgtgaaaatatccggatgctgaaggatatagcggacatcatgatagcggctgataaaataactgtctatcgactcttcataatgaaccggatcttcctcccgcagttgtgaaaaataagcatatggattgttttgaaattgatcagaaagcacactaaacaatttaatcgattggctcatgttttactccccctatcatccttcacatgtgatccgtttctcagaaagcatctgcgccatttcctgtacaatgagatacccgtgattcgaccgcatacaaatagaaaattcatggttactgatcttctcaccgagcttccacggacgatgataagcaaggagcgtctcttccacctctaaaatatccggagctccgataaaaaacggcagctcagctatgacatattccacagccaaattcagcatatcctcactgacttcttccatcatcaaactgacgccccgtgcacgcccgattatcgcttcacgagacatgtccaaacaagcatgtcgaaaatgaggctgctcaaaaaaagcatgttcaacttcttgtctcaacagctggtaggctttgttatccataaaatcagaaaatgtatgaatcgccttcggatccccgccatgagccacaagggctctttctgcaaatctcctgtttcgtgatacctctttccttacttttcgttcagcctttcctctcggagttccaagcgcttctagaagattagccgcctcatgccctgcaagtaaaactgaaacgcttttaaattgagctttcgcccatccaattaatctgtaaatataatcctctgaaaacctgctgttaaatgggctgatccccaccaaaacatgcctgcgccgttcaaatatttctctgcagttttctgttaatgcctcagcaataaaatgcacagaccttctttccgttaccattccggtcatctcattcacccctaaaacttatcccgctttaagtcatcaccctcaaatacaagatggaatagctagaacaactgaacaagacgaatggcaggcagcacttaaagtttccaaatgttttttaaaattttaattactatttccatttcacatatcatgataaatgtttactagtaaacattagtcattttatcccttttccttccaaacgtcaatatgatctgtgcccaaatatttgaaaataaatgtaaacatcacattttccacacactttttacacgcatattcagcatgacagatcaacaaatagtctaaacaccaacaattgacaacgaaaacaagaaaagataaaatgaaattgttcaccagtaaacaatttgttttattgtttcatcgtaaactattattactaagaaagaaggtagcctatgtctgatttgacaaaacagatgatatacgacatatacgtgagactgctgcaccttaatgaacaaaaagcgaatacttcacttcagcaattttttaaggaagccgcagaagaggatgtgattgatatccctaaaaacatgacaagcatacatgtcattgactgtatcggccaacatgaacccattaataatgccggaattgccagaaaaatgaacttatcgaaagcgaatgtaacgaaaatcagcacaaaactgatcaaggaagaattcattaacagctatcagctgacagataacaaaaaagaagtttattttaaattaacccgtaaaggcagacggattttcgacttacatgagaaactgcataaaaaaaaggagctggctttttaccaattcctcgattcattttcacaagaagaacaaaaggctgtattgaagtttctagagcagttgacgtcaacacttgaagcagaacaaaccgatgggactccggacaaacctgtaaagtaaacaaaaaggcggtgtacactttggctcatacaaaatcaaaggcagtattgatcttatacactgtttgcttcagtgcattttttgcatctttaagccagaacatttattcacctattcttccgatcattaaagaatcattccatgtttccacagctatggtgaacctgtcagtctcagtttttatgattgtgacagcaataatgcaaattatattaggagcgatcattgattttaaaggcgctcggatcgtcttgattaccggtattctggcaacggcagcagccagcatcggctgtgcggtgactactgactttactttgtttctgatattcagaatgatacaggcagccggttccgcagcactgcctcttattgctgccacaacgatcggacagctgtttacaggcaatgaacgcgggagtgcaatgggaacgtatcaaatgctcctgtctgtcgcaccggctattgccccagttctaggaggattcataggcggagcagccggatacgaagggattttttggatacttgcggccatctctatcgttttgctggtgacaaacagcatcacctttcctaaagattctccaactgaatctatgcagcaagccaaaggcaatgtgttcgctcattataaatcaatatttacaaatcgaacagggaacgtcattttgactttaagttttgttctctttttcatttattttgcagtaattgtctacctcccaatattgctgacagagcattaccatatagatgtgggtatagcaggactgttatatttgccgctggcgctgagcacgattgcaggtacgtttctgtttaaaagaatacaggcaaaaatcgggctgcacaccttgtttatcggaagcaatgtgattgccgcctgcagcatcattttatttgctgttacacattccgtttctctcgttctcatggctctgacgctggcactgtttggcatctcgatgggggttattcctcccttgtactctacaatgattactaatgaatttgagcacaacagagggagtgcaatcggaatgtttaactttatccgatatacaggcatggcagcaggtccgatggtatctgcctacttgctcacaatgatgccgtctgccatgtcctttagcctcctaggccttggatttgccgcattgagcttttgccttcttccgccaatgttttcgccgcagaagcgcacgaaacaaaaaaagcaccacatgtaaaaaagctgcctttgcgggcagctttttttatttttttctaagcggctctaaaatgcctttttgaatcagcaaatggaagaccgacaggataacggatgcccatatcgctgtgccgaagccgtcgatttgaaagctgtcacccataatggacgcggtcatcataagcgtgatggcgttaatcacaaacaagaagagtccaagcgtcaccatggtgaccggcagtgtaaatataattaaaagcggtttaatcagcacgtttaagatcgataaaatgaggctggcgataatcgctgccccaatgctgctgatatggatggagtcaatatatccatcaatgacgattaataacaatgcattgactaaaatgctgactgcccattttaccatgtcatttcatatccctttctgacgggacgataaaaatccaaatgatataaatgagcaaaaccggcaagacacttgtcataatggctaagatgacagttatgactctgaggagtgatgcgtcccaattgaaatattccgcgagacctccgataacaccggcgattttcttatttttttctgagcgataaagcttattcattcgatcacctctgtgagtactttagtttgatggcgcctgttagtgattctgagaagacggtgatgttttgatcatgtgcctgatttgaagtgaacatcatttctttttgaatcgtatcatttttttccttcagcatctctacatccattaattcatgggacagcgtaccaagattgcttttcagctctgccttcactgcgagatcgtccggaattgcaagctctacatttccagtcgttgtttttgcataaatggagcggcagtctgattctgttacgttaatcgcaatatttccgttaaagctttgaacgtcaatggattcgcttttccctcggagatcgatcaatccgttaatggtttccgcttctatcgtaccgcagctgtggcttgcgagcttaatttgcccgttggccgtttcagctatggctttttcggctgttaaatacgagaacgacagcacgccgtttgtcgttttcgctgagaactcttttacatgtaaatgttcccctctgaccggaccgttaaacagcttcacccgaatcttatcatactccttctgaggaatatacaaagtgacattcgttttcatcgtctttttctcagtacggataaaaaacttattacctttgatttcacattcaatatgctgaagaaatgcgtgtctcgccgcatcctggttgtcagcgcgatataccttcgcctggcattccgctctgatatcgtcatcttcccaagggacgatatttacgctgccattggcaatttgcagctcaacactggaaaagtcagtatctttaaattgaaaaatgtgctgaacatcatacgcatggccaaagtttaaatcaaggtcaacttccttgacctttttcacagcagaatcaatccagtcaaacagcttggctcctaaagacggtttaccgctttctttttttgccgttgtaaatggctcttcctcgtcatgaacgtgaactgagagcgctgtgattttctcttctttttccttgtagtcgctgtcaagcttttcaatcagtgtcaaagcttcttgtgctgtaagctttccttcctcaacaagcttaaggattcgttccttttcttgcttcattacgatctcctccccattgtctacttatgctgcacgcaggaccttaatgccctgaatcacattccaaatgataatgccaatgacaactaagaaataaataaccgctcccccgatgattacaaatacaggaagcaagctgtctccatcaatcgcaacggctccgccaagtaaagcaataaaaaggaacagccagccgacaaacggaacaatgtgagaaataagagagcgtatcgcatggcgttttgtttctttctcatttacaacaaaatatgcgacaatcggcacaatgattggcgcaatgaacacactgaaataacaaagtgatgcaataatagcttgattacggttcaattcattccacactcctattgtgaattgtccatgacaaaagatcagggacgttttacttatttatacgtttaaaatctcttcaggtttcaaattcattctttagacatgctccgatttacggaaattggattttaaaaagttttagaagtagaatcttccggctataccgattacaatatgtaaaaagcttacggcaaccaaggaggctggacaagcaatggagaaagatcccagtgactatacagtaacacaagaatcagtgttaaagctgattcaggaacaaaaaagaatgaatcgtgaaatgatcaccgagcttgagcagattcacggacccttcccgatctctcacgatatccaatatataaaagtgctgctcgacagcagcaacacacatattgttcaagatttaatgagtgtaagtaagcagctgtataagaagactttgtaattgcggaaaacatatcattcattataactgaaacaaagctaaaggttagatgacaatatcttgccttttttgttttgaaaaaacaagtgattccctggctgtcacaaaatgattgtaacaaaaaaaagcctgccggcacatccagttaatggactctgtcggcaagctgtaactatcagaaagagatagccgttcaaaattaacgtaacaattgaagcacgttttgcggctgttggtttgcttgagcaagcatcgcttgagaagcttgagaaagaatgttgttctttgtgaaatcgctcatttctttcgccatgtcaacgtcacggatgcgagactcagcagctgttaagttttcagaagaagcaccaaggttgttgattgtgtgctctagacggttttgtaccgcaccaagtttagcacgttggtttgaaacacttgtaattgcactatcgattttaacaatctcagtgtcaaaactaaaatcatctgctgaaacatcgataccttttactcctaaagttgttgcatccatgttaccaattgtaacattaatattttggccagcatttgcaccaatttggaatgtaaatcctgctgtttcactaccgtctaaaagtttttttccgttaaattcagtacgttgagaaattccatcgatctcttcagttaaagcatccatttcatctttaattgcagttaaatcttcagtttgctgtgtacctgtgtttcctgcttgaacagtaagttcacgcatacgttgaaggattgcatgggtttcagtcaatgcaccctcagctgtttggataagagaaattccgtcttgagagtttttagaagccatttcaagacctctgatttgtcctctcattttttcagagatcgctagacccgcagcgtcatctcccgcacggttgatgcgaagacctgaagaaagtttctccatgttttttgagctcgcactgttgtttgaagacaaacggtttagtgtgttaagcgctgcaatattgtggttgattctcatgtgaaaaatacctccatgtgtatatgtttttgaaatcaaagacttccttttctttgatttctggcgtatcagattccaataaagcttctaacctatgtagattcagttattgcttaaggatgcctttaagccccttaatagggtttgtctgcttaatttggaaatcatcatccgcctttcaattcatatatcgacagccatttgtaaatgtttaggcgttttcccaaagaaattataccaaagacgaatctaaacctattatgccgtaaagaaaaagcttgcctgctaagcccaaggatggacttgctgacaagctgtcccctcttaacagaggtttttttaagatgtagctgtttcttttgctttcaagagcgatttcatgcgtgttttgtcacgttcgataacaggcttcaaataacggcctgtatacgattcttccacttcagtgatttcctcaggcgttcctgacgcgacaatggttccgcccccggctccgccttccggtcccaaatccacaatgtaatcggccgtcttaatgatatcaaggttgtgctcaataaccagtacagtgtctccgttgtctaccaaccgttgcagcacgacaagaagcctggcgatatcgtcgacatgcaaacctgtcgtcggctcatctaaaatgtagagcgtgcgtccggttgagcgtttgtgcagctctgacgcgagcttcacgcgctgcgcttctccgcctgacaaggtcgtcgccggctggccgagcgtaatataacctaaaccaacatcataaagggtttggagcttgcgtttgattttcgggatattttcaaagaaagaaagagcatcttcaaccgtcatatcaagcacatcagagatgctttttcctttgtacgtcacttcaagcgtttcacggttatagcgtttgccgtgacacacctcgcatggaacgtatacgtcaggaaggaagtgcatttcaattttaataatcccgtctccgcggcaggcttcacatcgtccgcccttcacgttgaagctgaaacggccttttttatagccgcggaccttcgcttcatttgtctgcgcgaatacatcacgaatgtcatcaaatacaccggtgtatgtcgcagggttggatctcggcgttcttccgattggcgcctggtcaatgtcaatgactttatctaaatgatccaaacctttaatctctttatggctgccgggcttcgctttcgctttatgaagcttttgcgccagcgccttatgcaaaatttcattaacgagtgtactctttcctgaaccggaaacacctgtaactgctgtaaacgtcccaagcgggaacttggcattcacttttttcaggttgttttctgaagcacctttaatttcaatgtaacgtccgtccggctttcttctttcaggaggtaatgggataaactttttccctgataaatagctgcccgttaatgagtttggatcttccatcacttcttccggtgtacccgcagatatcacctgtccgccgtgaatgccggctcccggtccaatatctattaaataatctgctgccatcatcgtgtcctcatcatgttcgacaacaatcagcgtgttcccgagttctctcatatttttcagagcgctgatcaagcggtcgttatcacgctgatgcagaccgatagacggctcatctaaaatataaagcacaccggataagcgcgagccaatttgagtcgccagcctgatgcgctgcgcctctcccccggacaatgtacccgctgccctgctcaatgtcaggtaatcgaggccgactttgtccagaaagcttaagcgctccacaatttcgcgcaaaatcaaattggcgatctgcatatccttctcagaaagggtaaggtctttaaagaaggcaagtgcgtcggcgacagacagctcggtaatttttccaatgtggcggccgtcaatcagtacggcaagcgcctctttctttaaccgatagcctttgcacgtcggacaagatttctgagacatatactgctccatttgctcacggatgaaatcagagcctgtctccttatagcgtctttcaatgttgcgcaatacgccttcaaattgaatttcaccttcgcgtatttgtccaaaatcattttcatatcggaaataaatcaggtcatccccgctgccgtacagcactttatccagttgatgcttcggcaaatctttgaccggcacatccatatcaatcccgtagtgggtgcagactgcctcaagcagctgaggataatattgtgagctgatcggtgtccaaggggcgaccgcattctccttcaatgacaaatcttgattggggatgacaagatcggcatccacttcaagcttcattccgagaccgtcacacgtcggacacgccccgaacggactgttaaacgaaaacagacgcggctcaagttcaccaattgaaaatccgcagtgcggacaggcataatgctcgctgaacatcagctcttcctcaccgatgacatcgatcataacccgtccttcacctaaacgaagcgccgtttccaatgaatctgacagccgggctgccacgccttctttcacgacaatccggtcaatgactacctcaatggaatgcttcttgttcttttctaattcgatatcgtcggaaagctcagccatctcgccgtcaattctgactctgacatagccttgtttcctaatctgttcaagcactttgacatgagcgccttttcggcccgagacaatcggcgccagcacctgaagcttcgttcgttccgggtattccagaattctgtccaccatttgctcgatggtctgggatgtaatctcaattccgtgttccggacaatgaggcttccctactctcgcatataaaagacgcagataatcataaatctcagttaccgtaccgacagtagacctcggattgcggctcgttgttttctgatcaatgctgatggcgggagagagccctcaattgcatccacatcaggcttatccatttgccctaaaaactggcgggcataagcagacagcgactcgacataccgtctctgtccttcagcatatatcgtgtcaaaggcaagggaggatttacctgatccggacaaacccgtgacaacgacaagctgatctctcggaatcgttacatctatatttttcaggttatgcgccctggctcccttcacctctatccgatccatagccatttgttcatcatccttccgcttttagctctaaaagtaaatcgcgaagctccgcggctctctcaaagtcaagcgccttggcggcttccttcatttcatgctccatctgttcaacgactttctggcgttctttcttcgtcattttcgacagcttcggcgcggcttttgttttgtattccgctttatcctcagctgctactgtggcacgaatgacatcgcgaatttctttatttatcgttttcggcgtaatgccgtgctcttcgttaaaccgctcctgctgctcgcggcggcgttttgtttcattaatcgcaatttccatagacttcgttattttatcggcgtacataatgacgcggccttccgcatttctcgctgcccgtccgatggtctggatcagcgaccgctctgaacgaaggaaaccttccttatccgcatccaaaatcgcaacaagggatacttcgggaatgtccaaaccttccctcagcaggttgatgccgacaagcacatcgtacttgccaaggcgcaggtcgcggataatttcaatccgttcaagcgtcttgatctcagaatgcagatagtttactttaatgccgatttcttttaaataatcggtcagatcctctgacatcttcttcgtcaaagttgtcacaagcacccgttcattccgctcgattctagcttgaatttcgccgatcaagtcgtcaatctgaccttcgattggacggacgtcaataagcgggtcaagaagccccgtcggacgaatgatctgttcgaccatttcatctgtatgttcaatctcgtacggccctggtgttgctgatacatacacgatattgtgcatatgcttttcaaattcctcaaaacgaagcggacggttatcaagcgctgatggaagccggaagccgtgatccacgagcacctgtttccgcgcctggtctccgttaaacatgccgcgcacctgaggaattgtcacatgcgactcatccaccacgatcataaaatcgtctgggaaataatcaagaagcgtatacggcgttgaacctggaggccgcagcgtcaaatgtcttgaatagttctcgatgccggagcagaaacccatttcacgcatcatttcaagatcatatcttgtccgctgctctaaacgctgcgcttcaaggagctttccgttttcatgcatgaccttcagctgctcctcaagctccttctcgatattttgaatcgccttctccattttctcggcccgcgttacgaagtgggatgccgggaaaatcgcaacatgatctcggtcgccgagaatttctcctgtcagcgcatccacttcccgaatccgttcgatttcgtcaccgaaaaattcaactctgatacaatgctcatcacgggatgccggaaagatttccactacatccccgcgcacacgaaatgtaccgcgctgaaagtcgatatcgttgcgggcatattggatgtctacaagttttctgagcagctcgttgcgctcaatttccatttcagtccgcagtgacacgaccatttcccggtattcctcaggcgaaccgaggccgtatatacaagacacactcgcaataataatgacatctctgcgctcaaacaaagctgatgtggcggagtgtctcagtttatcaatttcatcattaatactagcgtctttctctataaatgtatccgtttgaggcacatacgcctccggctgataataatcatagtagctgacaaaatactcgacagcattgttcggaaaaaattccttgaactcactgtaaagctgtccagcaagggttttgttatgggcaatcacgagagtcggcttattgacttctttaatcaaattagacaccgtaaatgttttcccagttcctgtcgcacccagcagagtctgatgcttcttgccctcctgaattccttttacaagcttttcaatggctttcggctgatctccttggggctgatatttcgagactaactcaaagcgatctttcacaaaaataagcctccgtttctttaacgaaatcttcctatagatatagtaacacaatggaaagcaaaatcactaaaaatacgaactaaagttcggtggttttttatttccagctgtttttgtgtataaaaaacctgcttttaaaacgtaaaagcaggtattcagtctttatattcattatgtccgatttattcttcttttttctctgcagcttttttggccatatacagtccgccagccacaagagacacaacatccaatcctacaataaaatacgtttctgtatagccttttaaataagaggcaaacagcaatgcagctgttaaagcgatcgccacataatgattaaaggtgactctagtaaatagaacaacaagcataaaagggaaaaacaatgcaaaaacggcttttgtaatcaacaaaaaccctcctcagggattcttcatctgatctgattatagtaaaaaatgaagaatcggacaatcgtgcattcgctccctctactacaccataccccttttcagccaaaatcaatcactatatttgcattttggtgccggtcaaaacttattccatggtgccgctgttctaatcagcggcactttttttattacatcatcaagtccgccgccagattccgagaataaaagaaaataggcatacagtaccagtacggccgcatttttcaggataatataaccaacttaactattcattttatttaggactttctgcgtttgacagcattttcctgaaaacctacaattaaatgatagtgtttactatcattttttaaacacaggctccgcaataaaaagactagagagaaaaacaaaatgaatgaagaaaagaggggtttcaaatatgtattctgttttatttcgccaggcagaagagtccagccagctggctggagcaaaaggaatgaatttgattaaattgaccaaacacggtcttcctgttccggacgggtttattattcaaacgaatgcgatcgcacgttttatggaggacaaccagcttcaagagactagtgaaaacgtcgaaggcgggatcatttccggaacattttcggatgagctgaaagatgagctgactagttccttttataagcttagagaatcatatcgatccgtagccgtgcgttcttcgtctgcctcggaagatttagaaggcgcctcattcgcgggtcaatatgaaacctacttaaatatcaaaacagaggaagaatttctggctaaagtgaaagaatgctgggcttcatttttttctgggcgggtcagcagctataagaaaaaaatgaacaatcaaatcgcagagccgttaatgggtatagtcgttcaggggctgatcgattcagaaatgtcaggtgttatcttcagccgcaatcctgttacccatgatgatagagagcttttaatcagcgccagctacgggttgggtgaagctgttgtttcaggaagtgttaccccagacacgttcattgttaaaaaatcttcgtttgagattcaaaaagaaataggtgcaaaggaaatctacatggagtctgcggcagaaggaattgctgaaaaagaaacgagtgaagacatgcgcagccgtttttgccttacagatgaacaagtgattgaattggctgaaatcacaaaaaaaaccgaagacctgtacggatatcctgtcgatatagaatttggaattgctgatcatcaaatataccttctgcaagctcgtccgattacaaccattgatcaggacaaaaaggcggcagaagaaaaacgcagcttcatgattaccgacactgatatgaatgatttctggcttaacatggagtctaatattgaaggtccggtgagtccgttattttcatccttcatcgtgcctgcgttggaatatggcttgaagaagagcatgcaaaagtttccgattggtgtagttgttgatgaagtaaaactttatcgcggacatatttattccaaaaaccaaggagggcagcagcctccttctgaagactgcggcaaagagcttttcccgattttatcggagcatatgtatgacatcattaatcacacatacctccctttttaccggacactggaccagctcgcacaaactgagcataccgcagaaagcgcactggatgcttttcaaaaactaaaggccttttatctcacggcttatgaagagcacttcaatatcgttttcccgcaaatccttttaacaaacaaactgcaagcgatgtatcaggacattcaaggagagtccgaaaacgctcatttttacgagatgctgacaggaaaaatgaacaaatcactggaaacggaccgttgcttatggctattttctgtggaagttcaggagaacccgaaccttctggccatttttgaaaacaacaagcctgaacaactccaggagaaattggaacaaacagatgagggaagacacttcctgaagaacgtccatgaattcttgcaagaatacggatggagatctgttaaaagtcatgatctgattgaacaaatctgggtggaaaatccgtatttcgctctggccaatattcaaaattatgtccgtaatggctatcattttgacaatgaatttcagaaaacgaaagaaaaacgagagaaattatacaatgaattcttggaaaacatagaagatcccggtttacgcaccgaatttgaccgctattatcaatggacactgaactctgcaaatataaaagatgatcaccacttttatattgacgccatgctggatgccaaggcgagaatctttctgctgaagataggtgaattgctggcggaaaacggtgtcattcaagatcgtgaggacctttggttcttatatgatgacgaagtggaacaagcgcttcttcaccctgtatccctgcaagaaaaggctgaaaaacgcagacagatttttcatgagtatgagctggcccaagccccggcctacctcggcaccccgacaaaagaacagctcaaagcagctgaagaaattgtcggcgctgtgatagaggatgaaaaaaacacagagaatcatatttttggcattgcggcatcaagcggcattgcgacaggtccggtgaaaatcattcgggacgccaatgaattttctcaattcgcgcctggggacgtactcgtttgcaagatgaccacaccgctatggaccagcctgtttcaagacgccaaagcgataattacagacacaggcggcattttgtctcacgctgcgattattgcccgtgaatacggcattccagccgttctcggcacacgcacggcaaccgaaagactgcgagacggtgacatcatcactgttgacggtagcagcggcaaaatcacagttgtcagccggtcctgatgcgtccccctctttcttatacaagcggggcgggtgtatacttgtcctgccagtatactcgtgaggtgaaacgtattgagaccgacaaacaagagaatccttgatgctgccatgcagctgctcgtcaaaaaaggatatcgcgcaacaactacaaaagaaattgcagaaaaagcaaatgtaagtgaagcgacgattttcaggaactttaaaaacaaacaaggactagttgaggctttgctttctcagcattcttcaaacagaggcagcattttggaacaaacagaaggggatttgtacaaagacctgcttcatatcggaacctgtctcttggaggagctcgaacatagaaaagatatcattaaaatcagctttcgtgaaccggccatgtttcaggatgtcattaaccacgtcactgaatatccccaatctatgaaacagctattggttgattatctcaaaacaatgggtgagaaaggggttattcagacaggaaatgaagcggagcatgccgacgtgttcatgtcgattatcttcggttatttcattcaccgtctccacttaggagaccgggtcatatcaatgccccaggaaaaaatgctggagcacagcacagctctatttgtcaaaggaatttctgctgattaactccttggcataataaaaaggaggatcccaatgagctcaagaaaagaatgggcgctgatcgtctcgctattattgggggccattctggttcccattaactcaacgatgatcgcggtcgcgctctcatctatttcccatacgtataacgagtccatcgcaagcatcacttgggtggttaccgtttatttaatcgtgatggcagtcacacagccgattgcaggaaagctcggtgacatgtacggcaataaaacaatgtacttatggggagtcggcctttttctaatcgcatctctaggctgcgccctttcaccgagtctgctcctgttaattgtctttcgggcattgcaggctgtcggcggggcattgcttacgccaaacagcattgccattatccggcatgttgtttctgaaaaacgcctaccgaaagtgtttggatttttcggactgggtgcgggacttggtgcagcactcgggccttttatcggctctatactgattgacagcttcagctggcattcgattttttgggtcaacatcccgttcctcgccattgctttatttacggcattaacgatgtttcctcaatataaagaaaataaatctgacgcgccgctggatatcatcggctctctcttgcttgcaggcagcatcgtttccattatcctgctgacgaaaaatgaggctccatggggatatgcggtatacagtgtattgatacttctttttgttccgctttttttcagaagagaaatacgtacccagcaccccatcattgactttgcactgtttaaaagctcaacctttacaaatgcgaatctatcagtcttgttaagcaatttgatgatgtatgccgtcttattgattatgccgttatttatgacgaaccaatttgggcttaatacgtctaacagcgggatggcgctttctgtattttcgatcttcatgtcagccagcaactgggtgggcgcgcagctccatcacaaatggggagccaaaaaaatcatttttctttcatttgccatgatggctggtgcgaatctattatttttgctgttaagcagctcgcattctgtcttattcctcatgctctctcttatccttggcgggctcgcttccggagtcggtctgaccagcatgcaggtgtcatcccttgccacagtagaccccggaatgtcaggagtggcatccgggattttctcgaccttccgttatttcggaagcatcatttcatcagccttaattggcctgatttcgggatatcacatcctatttatgattctctttgctgtatccatcatcggcgtttttgtttcattgggcatcaaatctgatgaaacggcacggatagaaaaaaactcagcgtaacgcaaaacagcccggcatcgcatcttcctgcggtgccgggctgccttttatgatccagaagcggctgcttcgtcttcacggtcatcctttacgaagaggatgcccaattcatgatgttctccttcataagaagctcgctggtcaaaacggatttctccattcaaaccgataatttcaagctttacatatgcacggttatgctgaagcgcttcatagaaatcagaaacgttcttaaccggtatgccattgactttcgttatgatttccccgattttcaattccagatcctcagccggcgtattggggataatcccaagcaccattaagccctgatcccttttcgagaaataaaacggagccgcgttatcattcactctttgctttatggacaaaaaaatgcgccctaacaaagcagtacagaccgctgcacccgcaagcggcgtccacagtaagctcgctgcaccgagaactgcgacggcaagaccgagaatacaaacgcgtttcgctgtgatccttatactcgtttcaggcagcgatccctgtaccctttgtccaaatccgacaaagtaaggaatccatagaaaatgaaatgagccgccgggaacagtaaacacgggccaccagctaaggtgcgattctaaaccattgccgggcacgagaaggaacagcggcaaaagccaaacccggtttgccagctgctgtccgatcggcaaaccgcggctgcttacgacaagtgccggtgatgttctcacatgcgcagaacgataagcaaccgctccttcagtgataatcagcaaacctagaaacacagccacagccggccaaacaactgcaaatccttgctgaaatctctccagaaagggctccgcctgatatatttgcagtccaaaacctatcagcatactcacactgacgatatatgcagcagacatccagtttgcgcgaagagtgaacgctgccgctgcagtgataacggcaataatcgcaagtaaaccgagaggaatcgatattccgagtccacctaaaataactgacaaaagaagacctggaatcagtccctttgtatatgtaaatttcagatcatcataaatatctgctattcttgtatgaaaggtttttcgttcccgtttgattcttacatagccgaaagccagggttatgatgataaaaaaccagaaaagcgggtgtaagaagaacaagcccgcgctttttaacagttcaattccccattgaacagacactatctctcaccgcctcaagccaaacatgttactcatattctatcaaatattaaatggcttggatatcctcaggagagtttatctctcttgcgtcatccacagcgtgacattcgatagtgaaaaatcctttaaatagtggtttacatccacatccaataacccgctgattagatgcatcgacctttttatatctgtcagattaattcctaatcgcttatggtttttcattaagtagttaaaataatgtttggcgcattcctcattaatgtcatttactgattcgacattggtgtaattgaccaaatatctgctgaacagcataagaagacttagtgcttttgtagctgaaaatgttacgtcttgtgttctgtcttttaattgttccactaattcataatattttttttcacgcacaatacttgccctcttcaattgtgaacccccattttctttatacagataagcacgggccagtataagcagcagtactggagtgctaacaagcattctcgctaacgttactctttaaatacctgtcgttcagctgccattaacctgattactgttctttttagaaccttcttatattgtatgaagtaaacaaagactaggcaacttgcaaaagtttcattttaaatgcatattaactcgttagaaagtctctctcatatattgatatcgggtaataacagtcctttataaatgtttatttgtgaaaatttttttaatttcttgtcaaaaactcattttttatgtgacttatgatccataatctctttaagtacaaagaaacaggagatggaataccatctcctttaattgacaaataatgatttcaatgctgtttgaagctgcaaatcatttttgtcatctgattttttcttttctatctgctgatttaatgtctctgcagtgcgagtgtcgatcacaccggttttattcagcttgttttgatcctgaaaagccataaccgcttttttcatgtctttgctgaaatagccatcctcacgtcccggatcaaagctgagaccttttaacaatacctgcgcatgcttgacgtcttcattgttcatgtccactttaagcggctctttcagctgtaaaggcccagcggaaaaataatcgggctgcttaatcgcaatggtcggttcaattcctttcttatgaatccaatttccatttggcgtcagccacttgtaaagcgttaatttgatgttgctgccgtcccccattggcacagcctgttgaaccgttccctttccaaaagacgtatcgcctacaacatcataatggccagcttcctttaatgcgccggcaagaatttctgatgcagaggcacttcctttatccgtaatcacattgacagggtacgcttttttatgggtcaatgttgaaaaataacgttttttatccccattgcgttcagcaatctgaatatacggctgatcctttgtaacgaaatgcttaagaatttcttccacactttgaagatatccgcccgggttgccgcgtacatcaatgacaagtccttttatttcttttttctcaagctccctcagcgcttttgcaaaatcctctgcggtgtgctcagaaaaagtagagatggcaatatatccgacagaatgcccctgtacttttttctctgatgcaaaaaccgtttcgagcggaatctcagctctcttgatccggaatgacagctgcttcttcgttccaggccgctgaatcttcattgaaacgctggaccctttttttcctcttatttttaacacagcgtggtttaaatccttgccggccatcgattctccattgatgctgataatttcatcattaggcttcaacccggctttttccgctggcgatttcttgaatggagaaacaataataattttgccgtcttccattccaacctcagccccgatgccttcaaatgaggaatcaagagaatcagaaaattgcttagctgtctgcttgtccatgtaaacagaataaggatcatttagcgtagacagcattccctggatggctccctcgagcagcttttctctatctactttttctacgtactcattcgatattaactcatacgctttttcgattttgtccatagctttatcccgttcagagtcagcttgtgccgtcgcgggaactgctgcagtctggggcttatccatctcaagcaggttgattcccgcatatacaccgacgcctccgaacagcatgctccctgctgctatcacagccattattttttgattcatcctttactcctcctgtatgccagactgtctttaccaaaacctagagatagtatatgtaaaggatggagatttcatgtaatcatagaagaaaaagaaggcaaatgaaaagccgtcccgaaaacggaacggctttttcactttatactcgcaaaaacttgcggatggaagtcagacttccccatactccaattactgcgccgattgcaatcagcactagcgaaacttggaatacaaatggattataaggaagaagagagacaaatgatccttgaacctttggaacgacccatccgatgacgtattggtaagtgctcagcaccagtgcaatcggaatcacagaaccgaatacgcctagcagcaatccttcaaggaaaaacggccagcggataaaccagtttgtcgcgccgacaagcttcatgatttcaatttcttttcttcttgcgaaaattgtaattttaatggtgttggaaattaagaacatcgccgtaaataccaggccgataattaacgcgattccgatgttgcgggaaacgccgaccactttaaacaaacggctgacctcttcttttccataagtgactttataaacatgatccattttttcgatctttttcgccacgttcggcgtatcatgcggatctgtcgttttgacgacaaacgcatcattaagcgggttttcctgatccttcattgtcagggattttccgctgtcaccaaaactgtcaaccagctggtcaagctctttttctttagatgaaaaagtgacactctgaatgcccttcagttccttaatatcgttctgaagcttgtcctgtgccttctgatctgcagtcagatcaaccagcactttgatttcgacttgtttttctgctttcgtggccatgttattcaaattcagcataatcactaaaaacacgccgactaaaatcagcgtaacggttacagcactaatggatgcaaatgtcatccatgtgtttctcccgagagatttaaaactctcacgcaagtggcgcccgagaattttaatcatatgaaccatactcccctcttgactcatcacgcacaatgataccatcttcgattgcaatgacacgtttcttcatggtgtttacgatttctttattatgtgtcgccatcacgactgttgtcccgcggttattaacttcctccagcgtcttcatgacttcccaggacgtatccggatcaaggtttcctgtcggttcatcagcaatgacaacatcagggttgttcacaattgatctggcaatagatacacgctgctgctccccgcctgaaagctggtcaggaaattgtcgcgctttatgcttcagctgcacgagatcaagcacttcaagcacccgtttcttaataacagacggctgttctccaatcacttcaagggcaaatgccacattttcaaaaacagtaagtttcggaagaagcttgaaatcctgaaagacaacgcctattttgcggcgcacgaaaggaatctctttttctttaattgtcgcgagatctttatgattgattaaaatttgtccttttgtcggtttttcttctctgtaaatcattttaataaaagtagatttacccgctccgctcggcccaacaacatacacaaactcaccgggatgaatggtaacagaaatcccattgagcgcttttacgccgttcggataggctttatatacttccttcatctctatcatgaaatcacctaatcttttatatcattttatctatcacacggtcatactcttcgaatgcattcgacaatttatgatccattcatttgtaaaaagatgaaaaatctgaaagttccctttttcaatacacttcattatacgtcaaatttagacataatactattacagtttcttttcattcatatttaaagaataaatattcatttgggttggaagtttcgtttattacgaaaactgtttttccatttaaatgaatcaaatccactacttgacaatcattgataaataatataaaatttcgtcaaaattacttttttgtatattaatgttaatatatccataaaaatgaacttggtatcactctcaacttgttatctcatatttacataatctaagtagacacgaactaacagaaaaacatcattaatttatttaaggggtgttataattgaagctaatttacaaggacgaatacggtcctctatattctgaaaagtcaaagaattctatccttaaagagcctacttattttgaagttgattccaaagacaacttaaatagaattgttgataaaaaaggacattacacttatcaaaacaataagcttcataagataaaacctaaaaatataggtgcatctggcagtaatagtggataccctctcattatggataaaaaaggacactccttggaatatggtagagaccttcttgaagtatcaatgagaaataaactttatattaggaccacagaaaaagaatattgttatgagtacgataccgaagttgaaccagatactattcaaatttttgatgacaaagtgcttttgaatttaaaattaagacaaatggttgtacttgtatctacttcaggtaaagttttaaatagctttggtcttgatagatacagaggtgaaggacaaaaacaattaaatgttcccatgttctctgtatatatagaagatagaaattctatattaatttcagatgccattaattcaagagtaattgaagtcgacgaaaatggaaatataatttggaaatatggaaaggatggtttattaggttcggatcaaggactcttatggaaaccaacttgcgcaagaagactttccaatgggcatactattattgcagattccaaaaataaccgattagttactatagatcaagataaaaatattgtaaatgagattgggcaaacaaatgtttctaaattgtttctcacatatcctcgctctgttcaaatgcttgataaatataattggctggtgacaaatacacacaagaattctatctttatcatgaatcaaaatcaaaagaaaatcataaaacccataaatgattcttataacaagttaaatttattttggccaagatgtagtataaaaaactcggatgatgaaataatcatagcggacggaaagaataatagaataatgtttattgacgataaaacattacaaataaaaaaagtaattgattactattatgaacaaggtaatagaatgacaattattgatcctcatgatattaaaataaaccctaaaacaaaccttcttctcattaccttatctggaaacaatagggttatagaaatgactagtgatggcgagttaattgagagctatgataatctaaacgaccctcattctgcttattacttttcaaatgggattattattgctaatacggaagacaacaacatagttatttattatttttccggcaaaaaagaaatcattaataattttaaatctactaattcatgctgtgatgcctttaagagacctcgttatgcgctaccttataaaaatggatttctaatattagatacagacaatcaaagaattatatttttaaaaaaagagaataacgaatggattggagaaaatgtgcctatctattttcctgatggacctataatgaattatctttgttttcctcggtgcattacatttaacaatgataatgaactaatcttaaccgatactgaaaattgtaggattttacgccttgtgattgacgacactcttattaaggaggagcattcaaatgaaatataaagttgattcggcacatggtggtgaaggttgggtacctagaaagcaagatcactctacagaactaggtcatttctggaataactgtggcgtaaagggcgaattcggtaccctgtcacatgttttacttagaagtccaggtctagaggtagaacaaaattttaatcctgctgatatcctatggactgagagaatagaaccatcgaaagcaagagaacagcataataatcttattgaagtttatcgctcccaaggggtagaagtagacttaattgatgataaagcagctgaatcttttccaaatattttgtatgtcagagatttgtttacaatgacagatcaaggagcaatcctatccaggatggcatcagaggttagggctggagaagaagtaattatttctaaaaaactatctgaactcggtatacctattttagcctctcttcactcggatatgatattagaaggtccagacatattaatagtcaatcctgatctagtatttataggttatggtataagaacaaattataaagcagctatgtatgtcaaacagatactattaggattgggatattccgaagttatcatcattcaaactacttatggctgcggacacttggatggtgtagtgaatattttaaattctcggtatgctgccattgttccaaaaagagtttcatatgagttgtacataggattaaagaggcatgggttttcaattattgaacttgacgacatgtatgaaatagatcagttgatgtcaattaatttcgttcagctaaacgaagagactcttctgattaataagggtgccaaaaatacagtgtctcaatatagctcatgtggctttgaatgtctagaaatagacattagtgaattaacaaaaggaggcggctcaattcattgtttaacagggattttaaggaggatttaacgagatgggcgtttctatagtaattccaattaaagttaactcaatcgatgaaatatatattgatttcatcaattacatcattgatttttcttccaatgtattaactaaagacgttgaaataataatagccaatggaagttctaaaaatatttatatatttgctaatgaacatcttaaacatttgaaaaatgttatacattttatcccacatcgttcaattagaacaggagacaacgataaactaaacgggatatactctgctttaatgtacactaagcatgataacattttattagttgatgatcactatagagtatcaagtgaaacgcttgcagatatattaaaatactatgaaaaatatgattgttttaagtttatgcctaaactacatcaatacccacattcagctttaattgatacatgtggaatgtttattgttaatgtattagatagtagaaagcaatattgcggccatttagcctttaaaaaaagtttatatagtgaatggggatttatcaatagagattctctatttgatgagtttgctatggaaaaacatttacgaaaaaagggaagcagagtcggatttataaaagatatcgctctggaagccaaacaagaaattccgtttaaaaaatttcttgagcagagagtacgttatgcttatgaaaacattgctactccctatcgctttacctttttcgccatgatcttaccacttttaatactgttaagcctgatagacacgaactatggtctgaattttgcattttttctaacaagctggacctttgtcatatcaatagtaggtcaattcatttatggtaaacaaatcaccccttggtacacttcactatatagtcctatttggttctggttttatccttttactacgtggatagcaatttacaagtaccttaccggaggaatcatgtttggcgggaataatattaggagggcaggatagatgaaaatcactcaaaagattatagggccacaaagtattgtatacttcaaaaaagataaaaatagagaatttgttgaaaaaatttccactgaacgaggagaagatgaattagttgatcaaattcacttttataaaatgttaccaaaagagattaagcctctttttccagccctatatgattatgatattaaaaacaggccgtttcgcatgtcaatggaattatgtgattttccaacattaaaagagattattttatacaatactaagcaaaacaagttgaaggaacacttatataatgttatacaggacatatttgaaaaaatacacaacttaaaacaaacacaggcaacaaaaaattatgtagaacatttgtatatagatcgttgcgtcaatagaataatagaaacaaagaaattaatgaaagaagcacaatggataaacaacgacttttacttagagggttcaattgtatccaacccaattcaaacggtttttgaaattataaataataataaggatttattaatacctgaatatctatgcactgtacatggacagctaggtccttctcacttaatgttaaacattcaaaagaagaatagttacaaactagttgatccaaagggatttcatgaatttcatgatccattgttggatattataaaaataggtaggtccttcctctatgggatggagtggttagaagatgacttgtataatattaaatattcttttaaaaatgaatatcttacaatagaagattttaatttaattaactatgatgaagtatatatgaagaagtcatttaaacctataatggatttagccataaataattacaaaaatgctgccctaagagtatatgccttaatttgctgtgatctaatagcaaatttaccttttgcatatttatcaggtggtgaaaagagagtagtagctttatataatctcatatatgctgctagtttagatttgtctcaattaaatgatgctgtaaataaggagaaacatatatatgaaagtctttcaaaataacagatataatatatttaattacaaggaaagttctatctttatagaagatagacaaccccattctgttcttacaatagcaaatttaaaaaatcaattagttgtggtgagacaaatgcgaaaaggaataaataatgaaaccgtcgaattgcccgggggacaggttgaagataatgaaaaacctatggacgcagcaaaaagagagctagaggaagaaactggactaatagcaaatcaatttattcaaataggtaatatttatcctctccctagtttaattaatcgccaaatcacatatttttatactgaaaatattgttggttataataagactattaaacaggatgaagatgaaaatatacatgtagaatatcacaaatttccaaaagtcgagtataatcttaaaacccaaaagtggagggatcaatttcttgcttatggagtatatatctgcaaattgaaaggaataatataaaaattttagaggttaaaaatggatgtccaatctatattatttgatcttgataacactttgttaaatagacaaaaaacttttgaaaattatttagattcatttatctccaagtatattttctataactccccgaccgaaaagaaagatataaaaaataaaataatagatatggataaaaagggagaaaaagataaaaaggaattgttttcagaattacaacatagattaaagtggagattaaccccttccgttgattatttagttgaagaatataaaacaatattcgcaaaaaacagtatagttatggatggaacttttgaggttctaacattttgcaagaataaaaatttaaaattagggattataactaatggagaatcattttatcagaagattaaactaaataacacaaaccttacatgtttttttgattttatcttaatctcagaggaattcggtaaagctaagcctcatcgctctatctttaaattcgctattgataagatggccattgatccacgaaaatcaattttcattggagacaatcttatttctgatatttatggtgcttctaggtttggattttatactgtttggtataatcactctaatatagtcaaacaaaatcccataactgtaaaacctaataaaattataactagtttaagtgaattgttgaaaataaaagactggtagccgaaaggagaaaaaagtgattattagtgttgattttctaaatcatttacacagtatttataataaaaataacgatctatccgaaaatgttaaaagaatattcaaagaatataaatgcagtaatatttatgaacacagtgtaagggtagcacatatggcaaaaaaattagctgtacggtttcgagccaatgaagaatcagcatatatagcagccttattacatgatattggaggtattgttcctaatggaaaaagaattgaaattgccaatatactaaaaatccctctttttcctgaagagatagagttcccactaattattcatcaaaaaatctctaaggttattgctgaaaaagtttttttaataagtgaccattctattcttaatgcgatagaatgtcatacaactttaaagtcgaaccctagtatgttggataaaattgtatttatatcagacaaaattgaatgggatcaaaagggttctcctccttacataaatagtctaatagaagccttagatgtttcaattgattgtgcttcaaatgtctatattaagtttcttatggaaaataaaaataatctaaaggttattcacccttggcttagtgactcttataactattttaaaaaataaccctcaactcaatactatatataatattatgtatttaaatccatcaaagttgtgtaaatattggcaagattctcttaagatagccttgtattttttgtttaacactcttagacctaggattaataactgaaatattaatggtctaagagtgttgattatattgaacgattaattaacatgttttatgtcggaaacaaggcattcaatttacactattatctttatttaccttattaaactaatatatattctattcccccccctgattcacatccaatcgaactaagtcttggttgaatgctttaattttattaattctttttataatgaataactataaacaatattattagtgtagaagattaaataatttcatttttattacaatatgaattaataattgtttttcaaaaaattccatgttataatttggtaaaccactgaaatttaaggagggttttatgagtaaagtatttgataaagaagaaatccttaaattgattccgtgttctgacaaaattgactatatatacttagcggggtcaataatggaaggtttcggaaatgatgcttcagatattgatgtttttgttataagtgaaaatccagatagactagcttatgaacctactaattttacaagagaagtaaacatacaagtaggagaatcattcataaaaaatattgttatagacagtattagatatgattttgagtactatcgttcttctagttttacttctttaatagaaaagttgaataatttgaattttaatacagaaaattatattccaaggtttacagcagatgaaatagatcttttacatagattaaaatttgctgagccgcttctgaataaaagtgcttttaatactattctaaacaatataaattttgaaaatttaaataattatttagtaataactaatattgagtcatatgatggacatttagaagacttacagggagctctttcttgttctgattttggtacttcatttgtgcttttaaaattattattaaaatattctcttaatgcttatttagcgaaatatggagagacaaatccaggagaaaaatggttatttagaaaattaagtagatacgccgaaaaacatggtgatcaacatttacttgataagtatcttaatttattatgttatccttttgagaaagataatatcaaacattatgctcaaaaaactattaattttactcaaccattaattatcaaagctcaaaaataaaaacggagggaagtaatcacatgatttatcaaaaaaatatgtttgtgagattccgtatcatcgatactaaaccttatcttattcttaatgacaatgcatttatcttagacgatgtaggcgttaatatttgggaatcaattgatagcaaaaaaaatattgaagaaataataaataaaatctcaaatgtttactcagtagagtctaataaaataactaaagatattaagaattatttaaaagatcttgaaaaaaacggattaattgaagtgtgtaaagaaatctcataggtagttaataatgtctggaatgggctcctttagtggaggtgagattaatgtataaaaagcctgtattaattaaggtgaagcttcctgttgcgttagagtttgtttaattactacttaactgattgacctatcttttatgaattgaggtgagattaatgtataaaaagcctgtattaattaaggtgaagcttcctgttgcgttagagtttgtttaaatctaaaaccagactaaaataattgatcaaaaaatcaaaggagcccatccctaacattattattaaatcaacaactactcataaaattttaggagtaaggtatacattatgctattagaagaagttttcacgtatatagttctttttgttatagttaaaacatgtatgtttcttataaggaaaattaggggtaatcttttatttgatgtgctaaggaatttattatttttcgtcccttttattttaccagcactttatttaggcttacctaatttaatttttcaaggttcgattaattattatttattatccattttttcatcatttttagctttaagcattaagtataaagaatttaaaccttacttcaataaaaatttttaccaaatcctcccgaaaatttcttttaaagactttttaatattggaaatatctttgataggaagcgctatttttgaagagtttttttacaggagttttgctcctcactcctcttttattgtaggcatggcattgtcaggaatcctatttagtattgctcattatatacagaactatacaagaagttttttcgatttaaagacatatattttattgtttttattaggaatggtttggtattggagttataaaaatactgggactttaattccagcaattttaggtcatttagtatataaccttcctagtatgattttcacctattttcactttaaatcatcaagatttcggtgaggaaaaagggggttataatagtgagtagaatcataattgcaactataaaaagaaattatatagtttcaaagagagtttttccttggtcttttattatagccagagttcttatgggaatctatgtttctgtatttgctttttttacttttaaatatatgtttgatggaaaaacagaaagtcattttttaaagtatagtaatgggatagactatataagctttgtagttctaggagccggtctttatacatattctatatctgtaataatgaatgtaggtagatctcttatgttagaaaatatagaaggtactttagaaagtatacttgtctcaccgtgttcacgtttagggtactttttaggagttttttttgaacaaataggtagatcaagtttagagtttctaatagttatatttttcagtttatatttaggtgccaatattgaaattgagaacactattccacttttaatagtaatcattattactacaatatctcttttcagtattggtatatttatagctactctaatgttatttctacgcgacacctatataacacagaatactttatttatagttatgggattagttagtggagtatcttttccgagggagtacttacctaatatcctctactatttatcctatttgtccccattatcttatgcactttctttattccgaggtgttatgacaggacaaaacattttaaattacacaaaggaaatcttggacatatttgtcttgagcctagcttattgtctttttggtttactttggcttaaatgtctggaaaaaaaaatattagaaaatacatttaactaagggtgatagtaaatgctaattgccaaggatattagtaaaacttatatattgaatgagagaaaaggtttttttataaaaaaaaaaacagagattaatgccttgaaaaagctgaacttaacaattaagccgggtagtattgtagggttattaggagttaatggcgcgggaaaaagcacaactattaaaatattatcgaccattctagcgccaactactggctccttgaaagttaatgaagtcgatgcattaaaatatcctgtagaagcaaaaaaattgttaaacgtaataactggtggtgaaagaaatttatattggaggttaactgctagagaaaacctcgaatactttggagcattatatggactatctaaaaaagaacttaaagactatataccatcatcacttagtttggttggattaaaagactcaaatataccagtcgagagatattcaaaagggatgaaacaaagattacaaattgctagggggctagtaaataatcctaaatatttatttttagatgaacctacattaggcttagacataaatattgcaaaagatttaaggcaatacataaaaaaattagctcaccaaaaaaacaaggggatattattaactacccactatttatctgaagttgaggagctatgcgattgggtttatataattgacaaaggaaatttgctcacagaaggcactccttcagatattgtatcaaaaataataccagaaattcaattgaaaatagaattgtcaaatctaagttgtgaattaaaaaaagaattattgtactatgttggtgcaatagatgctaaaatacattttttcaaagatcatactaattactcgattttattatcatcgaaagacgatttaacttctgatttggttaatattataacaaaatacagaacttccattctaagttttaaaaccgaagaacctaatcttgaggatgcattattaacattaacaagtaaacaaggtgattcaatttatgaattggttaaaggtaattaaagctgaaatatataaacaacataagaattcatttcattcaacaaaagcttatttttcattattaatatggccaatattaaacttaattaatgcctacttatgttacaagccttttaatttaaacgatttaaaattatatagaattaatacatctgacgaattaatatcctttttattaataggttttttcacttatatttcttttaagtcgttaatgcaaagtgctttacaaatgagttatgaaagatcaaatggaactttggaaacaatattcttatccccagcaaatcgtttatcattaatatacggaagaagcttaggatttatattcggtaatatatggatgttttttgcgtttactttttttataatgtgttatatcggatcaatacctatatataatttagtctattttccaatatgtttcattctaatcgtcatttcagcaactttatggggaggcttattaaatactatctttcttttttctcgagatgcttcgatattgtttatgattattgatgatcctatgatgttattttcaggtgtgagaattcctctaactcttttcccaatatgggcacaagtaatttcttttatatttcctctcactcatgttttagctgtagtcagagacttaatgttatttggagatatctcgttatcctcatggaatcatttattatacttattatcagaattattatttatgtatatgataactttatttttgctatcaaaagctgaaaaacatgcccgtattaatggagaattaaccttttattgaataggttaaaaaaaagtaaaaaatacttaattaaagtattttttactaaatttatttcttatagtttattttttaaactacatgttttttatacttttatttagcttgattacattgttaactaaggagaaatacctttgtctaaaggtgtttctttccttagttaacaaatcaatctccaatcatcttactttttttctgacagccatttggcaataacggcggcttccttatcatctacaagccccttcggcatattgccgcggccgtttttaataatgctttcaattttgtcttcgtcgtatttgcctccgacctcttgaagattaggccctgacacaccttctaaatccttgccgtggcagcctacgcagctttgctgatataattcttccccttcagatgcagaggcttcagtcttgctgcctgtatctgtcttctcttcttttgcatcatttgaaccgcaggcagccaaaagaactgaaagcgtaaatacaagcattagtatcgataactttgatttcatgttgagaagcacaactcctttacgatctcttccatattataacctcgtttaagcacgtttgaaaccctcgcccagcacctcacttgcatccgccacaatcacaaaagctgactcatcaatctgtttgacgatttgtttcaatttggtgaattcagtttgcccaaccacgcacattaaaatcggacggtcatcgtcagtatatccgccgactgcagagatttttgtcacgcctctgtcaatcttctgtaagacagcctccttgacagcctgctcctgctttgtaatgatgagcgccatttttgaacgattaaagccgacttgcacaacatcaatggttttgctggacacatagacgccaagcatggcatataagccttgctcaatattaaatacaatcatagccgtaacaacgatcattccgtcaatgatggcgagacacttccccaatgacagaccggagtacttatgaatgatctgtgcagccaaggctgttcctcccgtcgatcctttccctaagtacacaataccaattccgatacctatcccgacaccgccaaaaatcgccgccaggagttcatgatgagtggcgggctgaatatcccttgtcagaaacactactagcggcaaaaacacagaacctgcaagcgtctttagtccaaatttcccgccgagcaaaatgacgccagcaataaataaagggatattaataatccactgtacatacgctgcttcaaaaccatatgattgtaaaatcgtactgatcccgctgacaccgccggcggcaatcttgttcggaagcaaaaatacattaaaggacacggccgtaatcgctgctcctatcaatatgtatacataatcccgcaaaatccacaatgttttattccgtacgtccatcatatatcctccgtttcttccaatgctctccgatagcattttaatccttccctgattagatgtaaataacacccaaatacagtggtaatatgctaaagcagcagtgaaatcaaggatataaggaattaaaaaaacacacccgttgcatcaggtgtgtttttcagcttatgaaagcttagaacgcaggtaggcatcaataaacgtatcaatgtcaccatccattacagcttgaacgttccccatttctgtattggtccgatgatcttttaccatggaatacggatggaatacataagaacggatttggctgccccagccgatttctttttgttcaccgcgaatttcatccagctctgcctgctgctcttcaattctgcgctgatacagcttggccttcagcattttcatggctctttcacggtttttaatttgtgagcgctccgtttggcatgtcacaactacgttcgtcggcaagtgagtaatccgaacggctgaatccgtcgtattgacgtgctgtccgcccgcgccgcttgcacggtacgtgtcaactttaatatcctccgtacgaatatcaatatcaatttcatcgttaaattcaggcatgacttcacatgaaacgaaagatgtgtggcggcggcctgatgaatcaaatggtgagatccgcacaagacgatggacacctttttctgctttgagatacccgtaagcgttgtgtcctttgatgagcaatgtcactgacttgattccagcctcgtcacctggaaggtaatcgagtgtttctactttaaagccgcggcgctctccccatcttgtatacattctaagaagcatagagccccagtcctgtgactctgtaccgccagcaccagggtgcagttctaaaatcgcgttatttttatcatacggctcgctgagaagaagctgaagctcaaactcattgaactcttttgttaatgattttagttctttttcaagctcaagctggagatcagtgtccggctcttctttcaaaagatcatgagtcatttgtaattcttcgtgggattcattcaattttttatacgaattgacataatcctttaaaccgtttgcttcatttataaccgtttgagctttttgctgatcattccagaattccggatcagccatttgttcatctagctcagcaatgcgggcctcctttgattcgaggtcaaagagaccccctaaagtccgctaaacgagaagccatattttcgagctctgctctgatttctgataattccatttcattcacctcattaaaagatccgcaggcgcctgcacgcgccgcggtcagtaaacttgccggggcgaactattcagtacggccgcagcaatttttatattttttcccgcttccgcagtggcatggggcatttcgtccgatatcaaccactttgcgaaccggtgctttctttgcttttttgttatcgtcgccttcttgcggctgatgagctgttgtttggccttgtacaacctcttcacgctccagattgttttcaatctcagctttcatcacaaattttgcgacttcgtcctcaattgattcaatcatatgctcaaacatcgcaaagccttccatttgatactcacgaagcgggttcgtctgcgcgtaagcacgaaggtgaatcccttggcggagctgatccatcgcatcaatatgatccatccatttagaatcaacggcacgaagaacgataactttttcgaattcgcgcatttgctctttgccgaattgctcttccttctcattatattttgtgatgatgcgatccataatgagctcaagcatttcatccggttctttcccgaagatatcgctcttctcaagcgcaccttcatcaagataagttgtgttgataagatcaactagaccgtcaagcttccactcctcaggaagctcttctcttggcgtatagactgcaattgcgcgttcgagagaagacttgatcatattttcaacgatttcacgcaggttttcagagtcaatgacttcaaagcgctgcttataaatgacctcacgctgctggcggagaacatcatcatattgcagaagctgtttacgcgaatcgaagttattgccttcgacacgtttttgtgacgattcaaccgcgcgagataccattttgctttggattggagtagagtcgtccatgccgaagcggtccagcatcgccattgtccgctcagctccgaatctgcgcatcaattcatcttccatagaaagataaaattgagtaatccccgggtctccctgacgtccggaacgacctcgaagctgattgtcaatccggcgtgattcatgtcgttctgttccgacaacagcgagcccgccaagctcttttacaccttcgccaagcttaatgtccgttccgcgccccgccatgttagtcgcaatcgtaactgcgcctttttggccggcctcttcaatgatctgcgcttcacgttcatggtttttggcatttaacacttgatgcggaattcctttgtttttaagcagcttagaaatcaattcagatgtttcaacggcaaccgtaccgacgagaacaggctgtcccgtcatgtaacgctgtgcgacatcctccgcaactgccttaaactttccttccatcgtgcggtaaattaaatccggtcggtcatcacggacaacaggcctgttggtagggatcgtgacaacctgcatgttgtagatgttgcggaattcttcttcctctgtcttagctgtacccgtcataccggcaagtttttcgtacatccggaagtagttttggaatgtaatcgtcgccaaggtcatgctttcgttttgaatctcaagcccttccttcgcttcaatcgcttggtgaagcccctcactgtagcggcggcctttcatcagacgtcccgtgaaggaatcaacaataacaacctgtccgtcttccactacatagtcaacgtccttttgcatcgcaacgtgagcttttaaggcctggttgatatggtggttgagcgcgacatgcttcacatcaaagaggttatcgatgccgaatgctttttccgccttcgtcattccttcttcagtaagctgtacagcttttgttttgatatcgtacgtgtaatccttctccgcttttaacgtgcggacaaaagcatttgcctgtacgtacagcttagtggattttgcagcttgtccagaaatgataagcggtgttcttgcttcatcaattaaaatagagtcaacttcatctattaccgcaaaatgaagcgggcgctgaaccatctgctctttataaagaaccatattgtcacgcaaatagtcgaagccaagctcgttgtttgtggagtaagtaatatcagcggcataagcttcccgtttttcgtcttttgacattgagtttaaattcaaaccgacagtcaaaccgagaaactcgaaaattttccccatttgctcagcgtcacggcttgccaagtattcgttgacagtcacgacgtgtacgcctttaccggttaacgcatttaaataaacaggcagggtagacgttaatgttttcccttcccctgttttcatttccgctatatttccgtcatgaagcgccacgccccccatgagctggactttaaacggaaacatgcctgttacgcggcgtgaagcttctcgaacaacagcgaaagcttcaacaagaagatcatccgttgtcgcccctttttcaagacgctctttaaattcaattgttttatgtttcaacgcgtcgtcagagagattttcatagtctccgcgaatcgcatcaatatcgttagcaattttttcgtatctattcagcgtacgttttgttggatcaaacattttatttaaaattccaagcatttataacgctcctctatcttcacatgcctattttagaggcatgtataaataatttactagtccatgtatacctctcattatcatatcataccttttgttatttccaaagaatttgcaaataagaaaaacaaaaaccttccgcggacatcacggaaggcttctcttcattattcagtcggttcaattaagccatatttcccgtcatttctgcggtacacgacatttgtaaggtttgtttccgcatttgtgaaaacaaagaaattatggccgagcatattcatttgcaagatcgcttcttcactatccatcggctttaaattaaagcgtttctgacggacgatgtccaagctctcctcctcttctatgtcatcctgaaccgcaatatctgtatcagagccaagaccgtttgccaataaatattttggagagccctgctcacggaatttacggtttactttcgttttatgcttacggatttgacgttccagtttgtttgttgcgagatcaattgcgttgtacatatcctcgttatgcacctcggaccgaagcgccagatctgtcatcggaatcgtaacctcaaccttagactccttgtcattgtaaaacttcaagttgacgttcacatcagcatccacgctatggtcaaaatagcgctccagcttgccgatcttcctctcgacatgatcctttaacgcgggtgtcacttcaatattttctcctctgatgttatagttcatcaaagaacgcctcccttttattaaggatatgtatctatttctcttttaccctttacaattcctgctgaaacataaatcttttgtgaaaattcagtgaactttgtcgaattttgtttgtatttgctctgttattggcggttcggaggtatatgtatatgctgattgaacgaaacaaatacctcacacacgcctaattgattaaaaagggttccatacattgatgaatagacagcatccattttctataatgaatcagaaaatgttcctttaaatactcacagaactcatgagagggaaaagagaaagagaccaattgatcaaactccgcaaaaatttggtcaaatgctttcacacaaatttcagcacaccgcgaatccataatgaagagaagtgttgaatgtgttgaatccaaataaaaaaaggcttggatcagatcttggtagatccgatccccttctgtttttgataaattctcttcagcctctatcaaataacacaacccctcttcgatggtaaaaagaagatgataataagctgataaaagcgtataatcttcaatgctcttcaaggcactcacctatttacgcttgtcataatatgtgccgtcaatcgtaatgttgttataagggtttaaatacgtcgtatgcatcacacgttttcttttcatctgctgaagttctgttgcgattgactgcttcagtctttccatttccttcacaatcagctgatcccatgtcaaaataagtttcatctgctttctctcttcttctgaaagcggcagagatatctcctgaatcagttcagaccgtgtagccacaaagtcttcaatttgctttaaaagttcatcgctttccggcgtattttgtatgtgtgacagcatactcttcgtctcagtgtatagttgatctatattattcatgcgatcccgcctgatccgtgccggtccttccgttcactttgaattgcttgtttccaagcatcgcgaaaatctgttacataaccttcaacctcagccagcatgcccgtatcatttttgatatttgcctgtaccaatctgcgatacatataatcgtacatcgcacccatagaagcggaaagctctatgttacggttaagtgtaaaatttaattcctgaataatattttgcgctttaatcagattttcatttttacgttccatatcatcattctcaatggcctgagcggcaagtcttataaatttcaaacagccattatacagcataagcgtcagctcaccgggtgtagccgtattcactgaattttgctgataggctgtataaggattttggatcgccatgtgtcatcctccaaattacatttattgtgctagaagctgtgataaataggacgattgttcgttcattttttgaatcgcagaatccattgcactgaattttgaataatagcggttttctattgtggtcaaccggtcctgcattttggtaatatcagtgctgatcgtatttaaatttttaccgattgaataatcattggttcccattgtcgagttgccggcttttgcttcaatgctcttcaccgtacttttcagggtgtcaccgatgcgtttcataatccctttatcactataggcgctgctgttcgatccacttgtaaataaagcggcgacactttgcggatcttcttgtattttagctttcagtttgtcttcattaatttctagatgtcctcgcatttggtaagcaccagacgttgtgatgccaaattcagttaattgataggtttttccatccgcactaacttgagaataaaaatcagtccgcatttgattcgtaccagtgcttatgctggtatcatttttcagcaaaccgctttttgccttctcttcccagagttctatctctttatcggacatggcttctttttgttcactcgtcagcggcgcatagtctctgtatttttcttctttcaacttttcattcaggctgtcaaccagttcattgtatttattcacaaactctttaatttggttgtaaatcccgtcaacatcagtagatacagatgtggtaacagggcctgtggctgcagttgtatttttgatcgaataagtaacgccattcactgtgaagttgtttgacagcttctccatttcaaagccgttgatggtgacttttgcattcgttccttctttgtaagcagtaatcttattatcagtgtccaaagaaaaacctagctggccagacataaaatctgctgtagcagagtctgctgcttgtatactgcctcctgcacctgttgctttagaagaaaacgcaatggtttccacatactctgtaccattccaaattttatctttaaaagctgatactcctagatctgagctgttaagtttagaaatcacattatcaatcgtatcagcgctcgtcacactaatgttcactgtttttgcggctgtctcaccaggcgcaacaacgttaaatgccaaattataatcgccctgtgtgtatcctgtataattgtttgccttatatgtcgcagcagttgccaaacttgctacttcaatagtagatgaagagtttgctgcacttgcagttcctgtagcagttaacacagattcgtttgagcttgatacggttttactctgaaacgtactcggatatgtcagcttattattagacatataatcttggaattcttttattttcgagtttacttcacgatagctatcacgctgccattcaagagtctgctttttttgtgttagcttattaagcggtgctctttctgtctgcatcagctttgatacaatatcatctatatccattcctgacgccagacctgttattctcgtgaccatttcaaaccactcctaatctactttttttcatctacaaataacccaagaaattcagtcatagctgcataaaaatctagccaccgccttggcggaatttcacggatcacttcatttgtagagtcctctattacttttacatagtattcatttaacttctcatggagctcaaacttcagatgaacttgcgaaggttccaaaaacttgttcattccctctaccatttcagcaaggtcggtatatgaaacttgatgaacaggaacctcactctcatgatctttctgattatgtatttgagtatcatagcgatcccaaacaggttgtaacgtagtgagcctttcaatgttcaattgatcatcccctatgccccaatctatcgtttatatcgactaaatcgagataacattacacatatttttggaaaaaatctcatccgttttagatttcttagtttggaaatacgtttataaaaagtaagtggagaatccggttattatatcatgatttaataacagcaagtggaatgattcggagttagaaatataaataaaagaccttggcaacgccaaggtcctctctaaaattaacgtaacaattgaagcacgttttgcggctgttggttcgcttgagcaagcattgcttgagaagcttgagaaagaatgttgttctttgtgaactcgctcatttctttcgccatgtcaacgtcacggatacgagactcagcagctgttaagttttcagaagaagcactaaggttgttaattgtgtgctctaagcggttttgtaccgcaccaagttttgaacgttggcttgaaacgctagtaattgcagtatcgattttcgcgatctcagtgtcaaaactaaaagtagctgatgaaacatcgatcccttttactcctaaagttgttgcatccatgttgccaattgtaacattaatgttttgggtagcatttgcaccaatttggaatgtaaatcctgctgttacactaccgtctaaaagtttttttccgttaaattcagtacgttgagagataccatcgatctcttcagttaaagcatccatttcatctttaattgcagttaaatcttcaggttgctgtgtacctgtgttaccagcttgaacagtaagttcacgcatacgttgaaggatggcatgagtttcagtcaatgcaccctcagctgtttggataagagagattccgtcttgagagtttttagaagccatatcaagacctctgatttgtcctctcattttttcagagatcgcaagaccagctgcgtcatctcccgcacggttgatacgaagacctgaagaaagtttctccatgttcttttgtgctgcaccgttgtttgaagacaaacggttcagtgtgttaagcgctgcgatattgtggttaattctcatttttatttcctccctgaatatgttgtttaggcacgtccttgtgcctcaattttgtaatcggcgagccatttgtgccctctcccggctacatcattaatatcggattgtctctgattttgttaatacaaaaataaaaaaatcctcactttttttgtgaggataatgcggagatcacatcgctggataacgacgccgcacggttattttcttcctgaatggttaaataaatctctttccgatgaatatcaatatgctttggggcttcaattccaagcttcacttgatccccctcaaccgcaatcacttttacttcaatatcagcacctatttgaatcgcttcgcttattttccgcgataaaactagcatgattctcctccaatcggatgctttgtcgtatatgaggagtcgtgtaaaacgacttgcttagccatcatgttcttgcgattcacaataatgggagccaataaattcgcagtagacttttcaaatggctctgccatagtcaatattgtcatgacttctacgtcttgaatattatcgatatccaaaagttcagcagttgattcatcaagatcaaattcataattcttaaaaaagataaacggacttacgacgataaacgcaagattttctgaagtgacggactgcagtgccacgaatggagagtcttctgaaagcggaagtatgacaaattgtttttcttctaaaaagcctggaatcccgctttcaaaaagaatgatttgttcttcttttatgttcatttggccatggtacttcgtatgaatgatcattgttcacgatccttttctttttacttttcgggtgattctttcgggtattctacatctatatttaaatcagggtattggagcatgtcaaccttaacatttcctggcgtatattcaacaattggcttatgcggctcagcctgaataacaggctttcgcggcgtaatctgaacatcaagctgtgacggagtatattgtattttcaccctagatagagaaggagcataattttcgcctaattgaatttggtgcatttcagagttcctccttgcttgtgaagcgattgggttccccttattttcaatcctcataagctcgtcgccttcttctgcagtacgcgctattccctccattacatcctcatgcccttgttgtgcggcttcttcaattctcttgaaaacatgctttctgtctaattcttcccatgcttgtgtctggtcaatcgtgagttttccaggtgtcaccgatatttccatttccgcactcggctgttcgatctctagatcagcttgaggctgctccatttttaagctggcaggcgtcgttgttaaaccaatttttccttgaacactatgcataatcaatctgggaatctgcatcactctacctcctgaactataaaaaaagcgaactcctgagagccgcttactttaaaaagtcaattaatgtaggctgaacaatttgcgcattaacggccagagtagccctgtgcacactttgctgcgcaataaattcagttattacttcttccagttctacatcttcattgtctgataacactttggtagctgtttcttcttgcgctgacagtcttgtattaaccaattcaagacgattatatctcgctccaagatcagatcgttcagcactcatgccgtcagaaaaatgatcaatatcatctaaaacactgtccatgccatctagcgaaccagaatttagtgctttctcaaaagaatcaagcatttcaaatacattctgcccgctttcagaagtgcctccaaaagctgactttggatctgaattcactttcaatgacatattatttgatatattgactacgacatcagctgtatcagaaattgtataagttccgtctccgttatctgtaaccggaggcttatctgaatttgtgccattaaagatatatctgccgttcacttgtgtattcgcaatatttaaaagctgttcctttaactgctttacctctacgccaatcgcttgccgctccgactcgccgtttgtatcattttgagcttcaaccgctaattctctgacctttgacaagatgtcaattccttctgtaatgtttgtttctgtgttttcgagccaggtaaaggcttgagaagcattgcttttgtactgctgcacttgagacagttgcgtattatactttaagcttttcattgctactacaggatcgtcggaagcttttgagatttttttccctgaagaaatctgcgactggagtttatccagcttcgagtagctcgaaccgatatatctcagtgagttttgctgtatcatgccttgtgttactctcatgtgactctacctaccttcctccaacacccatgccgttgatcactttatcaagtaattcgtcttgtaaagtcaccattcttgcagctgcattgtatgcatgttggaattgaatcatattcgtcatttcttcgtctaaagaaactgcgctcatttgctgacggtttatgtcagcatcatttagctgtgtttctgtattagacgccagtcgattagcctcttgagcttcgatccctagctcgccaatcagacccgcataataatctaaaacactagtttctttaccgttaatggttattttaccggttaaaacatttgctaattttgtagcatttgcgttatcgttggctgcaccagtcagtgagaaagcaatgtttgcgccttttgaatctattatgctgtcagccactttgatcttgcccgccgcgcccttggcaggttcagtttcaccgccagtaaaatcaaaaaagtctccgccttgttcaccgctcttggtcacaccatttctgtgcacttcattgaaagctttcgcgaattcaagcgccatattgtcaagatcagaaagcatttccgggtatacgcccttttcttggccgtctgctgttatatacccgtaagactctataaatcctaaaagggatcccttgctgctaaaggactccgcctgcacagctgtatccccgattgaaatacttgatactaacccagtttcattatcatagttggctgcaagttctgaaacctcgtaatttttaccgtccaaaacagttcctagcgactgtttatttttatcaaggatttcaattgatacagttccttcagcagatgcaagtgcattcccgcctgatttgttgtagttgactttgatatcaaccattgaggataatttatcgatcagcaaatctcgctggtcatataaaccattcggaagaagcccgaccggctctacttgtgcaatttgcttatttaaactgtttaattgagaaagcagagaattgacatccaacacagttgtatttagctctgcttttaaattcgattggacatttgtaagtgattcagaaatataattaaacgtttcagctacagcttgtccttttcgagcaacaacagaacgtgcactttcttcatttgtattattcgataattcctgcagagaattccaaaacgaattgagcacactgttcaagccgctgtcatccgtttcatttaaaacgccttccatttgggacagcgctttggccttcgtgtcatagtatccggcactgttgttttgaagacggtattggtagtcaagaaagatatctcttattctctcaactgattttccttgaacgcccgtacccatttgtcccgctgttttttctgcgtttttagatacagcagggaaatagtcagttgcttccaatgagacccgctgtcttgtataaccatcagtattggcatttgccacgttatttgcagtcgtgcttaacgctgcctgctgagcgcttaacgcccgccttgcagtttcaagccccataaaggtagatgtcattttctgaattcctttctgctaagcttttgaatcaaacagtttcattttgctgcttttcggcagctcagctttaattgatttgctgtaattgaagttattttccttaggaaccagcatatcgtacgaaatagagatgaattgcagcgcgtctcttgtcagctgcctattcatctcatttacttttttcagacgtccgagaacttgagaaagagattcgtatagttgttccagctcttccttttcactgcctgaggttttggtgatacatgcggaaatagtattattttcgctatatccgagaaaggccgaagttgttttgatccggtcatcttctgtctgcgtgattgcttgaatatatttttgctcttttgtcaaaatgttagaaagctcttttgttttgccggctttgagcgcttccgtcttttcttcagacagcgtgagcaggtgctcatgcagaacgcaaagtcgcttcaattgttcaataattgccttcgctgacatgggctttctccttttttattgctttttataaaaattaatcatatttttcgcgatatgatttgcgtctactttgtatgacccgttttcaatttgcgctttaagctgcgcaattttttcctgtcgtgaaccagtgactgcgtcggatgcatgttgcatttctttagcctgtgatgaaatttcaattttatcttgaggctgtgcagcagttttttgcaccgcttgcttatcataatttttttgatatggattaacggattgtgttccaaattgattgattttcataggattcctctcgctttccgttgcagtctttaaacaatcttaacccttttatcgactgcgttttcagttagtttagggaatcagctgtttttggtattataggcatagtatgtgtcttttttactattttctttctcgattttcagagcatcctcgtggttcaaatgatccatttgatccttaatatcggactggcaagccttgcagaatttgccttctctaatcgatgtcccgcacctttcacaagggtatgccaaattaggaagatgagtgatctgaattcgcttctgcctgatgaatttcaatatcagctcttcttccacacctgtttcctcagttatccggctcaaagttgattgccggttttcctgttttcttaaaaatttatagacagtctcaaatgatttttcttcttccttaatacacgcctgacatacggtttgcagctttgtttttaaaaataaagcattgcatttcggacaattagccagttctcccatcttttttctccttattagataatatgcctgtgtcaatttctagtgattatatcggcataaaaacagaatcatttagcttctgatcaaggtaaaagatgacactgaagcggcttttcctttttctaataagcagcgggctgcgaagtgcaaggtggcgcctgttgtataaagatcgtctattaaaatgatattcatacctgctgctgaattattttttgtatcaaaaatgcgctctgacagcaggcgttctgttttctttttctttgactgcttctcattattcaggcgaatgaggggatggtgggaaggccgatctaaacattctgccaagagctgtgcctggttaaaaccgcgctcttcttcccgttccttgctcagcggaataggtacaagaacaaaatgcttatcggggtaagccttagaaaaggttgaagaaaaatcacttttaaatgcatttatgatttctgcatctcctctaaatttaaaacgggagagcgcttctttcatcatatcattatatgtgtaaactgaacggttttgacgcaatagcaaactgtctctgatccttgttctccacacctcgcaatccctgcatacggcatgaacagattgaggtctgccgcacagggggcagatatgtcctgtgattttctttaatttgcttctgcaagaataacaaaccttttcatcaggctttagtaaaaaaagggctctccatgtaacatcttgagaaaattgcgaatcacataataaacagatcagtttatgaatgcctcctcctgcttcgtttgacataaatcgcttggactctctgaaactactgcagcagattcagccaaaatgacaagcattgctgtgtttttttgtttatctaccagctcagctttcgtatatgcgatctttttaagatcagtaacgtaggatggactcactttgtttaaagaaagtgccaatacatcgttttggcatacttggcaagtacaggccatatgaagctggtccatatatcggtcgagcagttctttcattacgatttcttttgaattgacaagcatttttacagctcctcatcatcggttatatgagtatactgtaccacgttttcaaataatggctagtctgtacattcaacttttgctgccaattcattcatttcttttatatgctttcttgcatcgagcatactctttgttttgccgaagtgaaagtaaatgacatcgccgtccgcatattctttatgccggccggttcttcctgcaatttgaacaagtgcgctttccgtaaagatagacgattccgctcctagtacacccgtttgcaccttggggactgtgacgcctctttccagtattgttgttgtgattaatagatcgagctgaccatctctgaattgctgcactttctcctttctatgcttgtcttccgcgtgcacagatgcggttcggcaatgaacacctttaaagcacgcagcagccttttccagaatagaaacggaaggaacgaataaaaaaacaggcctcccttcttttacatgaaactctatccatcttttcaccgctggcggaattttatttcggtttaatttcttcttccagtttccacaccatacaaagcgcggttcgggtaaaggtttccggtggtgtcttgcggggatgcgaactgaatgtaactgtccgttcagtgcttttctttttaattctttaggaggtgttgcacttaaataaacgagggtgctgtttttctttcttgctttttgaacagcgaattgaagggtttgatcagcagaatatggaaaagcgtcaacttcatcaatgatcataacatcgattgcatctttatatcgcaaaagctgatgcgtagtggaaatcataagcggagatagccgccctttgtcatcgcttcctccgtaaagcgctgaaatgtcagcaccctgaaaggcagccttgagtcttggagcaagctctaatacaacatcggtgcgaggtgttgcaatacatacacgcagtccttgatttaacgctgattctataccaggaaacagcatttctgttttgccagcgccgcaaaccgcccagatgaggagctcttctttttttgatattgcttcaattaaaacattggcggctttttgctgtccgcttgaaagcttgccatcccatgtcagcttaatagacttccagtttgattcattttcctctttccatgaatataaaggaacctcctcactcactctgcccatcatgacacaggaacggcaatacagcttattctttccagatgagtgataaaaagaaaaataccgctgatcagtttgtccgcacctattacatctatatctccgtttatttatggatatagaattttcagcagtgatatatccattcttgatatgccattcaatcatctcatcggaaaatgagagctcagtcctgagcaaatgacggcttcgaagcgtctgctgcaattcttttgaaaaggaactgtttttttcaactggcacattcacatagcacgcctcctttcgaaacagtatgcctgaatgaatattttctgtccaactattaaaataagaatataaaaaaatctccgctctaaaaacggagatttggccttatttaaaacaccagcaaattcctaacgcaccttcacccaaatgagtgccgattaccgcgccaaaatagctgttataaaattcaacatgaggatattttgcagaaagctcttcaatgattttcgctgcttcttcctctcgattagcgtggataacagcagctcgcataggcaaccctttactcgcatcttcgtctaaaagctcataaattcgcgaaattgcttttttacgtgtgcgaatcttctcaaaaggcacaattaccttattgtcaaaatgaaggataggctttacctttagaagactaccaatgaaggcttgggcgctgcttaatcgcccgccgcgctgaagatgggctaagtcatctaccataaaataagctcgaactgtttttttcatttcttccagttcttttataatatcttccggcgatgatgctccgtttttgattaattcagcagctttaagggcataaaagccttgagccaagcagctgatctctgagtcaaatggatacacatcaatattgtcgaccatcgaatcagccgctgctgcactgctgaatgttccgctgatcccgctggaaagatggatactgataaccgcatcataagacttgccaagctcttcatacaacgcaaccagctcgccgattggcggctgagaagtcgtcgggagctcattatgttttttcacttcttcataaaagcttttccagtccaactcaatttcttcacggtaagtctcctccctaaaaacaacctggagagggatcatatgtatctgatgttgttcacgcatttctttcggaatatatgccgtgctgtctgttacgactgcaatattcatagcttcgatacctgccttattgctttataactctattgtaagggaaacggcagcctaaaaaaagacctgcctagtaaaaggcaagtctcctattatactatctcatttctacccagccatttttaatggcgaccacaacggcttgcgtccggtcgtttacattcattttttgtaaaatattgctgacatggtttttaacggttttctcactgataaacaatgattcaccaataccgcggttgctttttccgtctgcaagcatctgcagcacttcacattcccgcctagttaaaatatgtaatggtctgcggatttcagggtaaacctcatgttgagggtgtgcagaaactccgcttgttgcaaggcggcggaattcgttaacgaggttgtgagtaaccttcggatggaggtaagatccgccctcagccactactttaaccgcttcaattaatgtatcagcatccatctctttcagcagataacctcttgcacctgttttcagggcatgtgttacataattttcgtcatcgtgaattgatagaataattactttagattcaggatacagctctacaagctgttttgtagcttccacaccatttacgtttggcatattgatatccatgatcacaacatcaggatgatagtgctcaacaatacgagccgcttcgtctccgtcatcaccttcggctaccacttcaaaggtaggttcaaaatccaatatccgtttaacaccttcacgaaataactgatggtcgtcgataataacaatgtttactttagtcacaagccacgcctccttgtattattgttctatatactctagcattcggtcaatatgccttttggctctattttacaaatcatagtcaaagagataacggaaccttaatcataataaatgtcccaagacctattttcgaatctattgtcatcgttccttccaataaatctactctttctttcatgcccagcaagccgaatgatttgtttttcttctctttcgcttccttcaggtcgaaccctttaccgttatcttttatcattaaaatcacaaaatcctttgtgatctcaactttgactgtaatttcttcagattcagaatgctttagcgcattagacacagcttcctgtgcgagcctgaagagcgcaacctcaaactgaggcgctagcctctgatcctctgtttctccaatgcactgaaaatgtattttgaccttcccgttatattcctcggttgtatatagatattttcttaaagttggaatcaggcctaggtcatcaagggccatcggtcttaaatcatatataatccttctcacttcgtaaagggcattccgaacattttggcggagatttttaatttcttggaatccgtcctctgcgccccggtcacggaaaatccgctcgattaattccgatctcatcataacattcgccagcatttgagcgggtccgtcatggatttctcttgagactctttttcgctcttcttcctgcgcctcaataattcttaagccgaaatcctgttttgcctgagcatcagcaagaagcagtccaacttcgcgcaaatcctgattcaagtagttgagcacaactgtaatttggcttactaatgattctgaccgctcaatgatttcctgaagccctagcaatctgcgctccaaatcgtcccgccgttcgcgcaattgcttctcacgctgctggatcatcgtcaattctacctgcagcttatgggctttttcataagcattgcggatttcctcttcactgaatctatgaaaattacggctgacctcggataaacggtttctcgcatggcgggtttgcacttcaagtttatcgccaagctcaatcacttcatacacctgctgtttaatttgtttcagttcttcgaccagctgttcatactgctggcgtgactgctccccgatttgaaaaacctcgtccttgctcccgtcaacggttttcagcatcttcatcaaaatagaatccagcactttggaatccatctttgttttattcataatttccctccgtcacggcgttgtcatatatttttattataaatgtaattgatctgcaaattatgtcgaattataatgaaagaatgcgtatattctagaaaaaaacatttttatatactatctactctttatgataccaaaatacgcacaaaaattctaaagactgtacgaatttgtataggcagtcttttatgcttagcaggagggtcagctagcatgctgcacagctattttactgtgaaagaagcaggagaacacgagattgttatagaaaaatcgcgttttatctgtcatttaagccgtgtttctaccgaacaagaggcacaggaatttatacagaaaataaagaaacagcactggaatgcgactcataattgctcggcttatgttattggcgagaatgatcatatccaaaaagccaatgatgacggggaaccaagcggtacagcgggagtgccgatgctcgaggttttaaaaaaacgcagactgaaggatacttgcgccgtcgttacacgctacttcggaggcattaagcttggtgctggcggattaatacgcgcttatgggaaatcagtgtctgaaggattaaatcatataggtgttgtagaacggaagcttatgcgaatcatgcatacttctgcagattacacatggcttggcaagattgaaaatgaattaagggagtcacaatttctgttaaaggaaatccattattcagaaaatgttgaattcgaaacatacgtggaagaaaaggaaacaaatgctttttctgaatggatgacagaactgacaaatggaaagagtgatattaaagagggagagttgacgtatcttgaaaaagccgtcaatcacataaaggagactgaataatggctgaacgcgttagagtgcgtgtgcgaaaaaagaaaaagagcaaacgcaggaaaattataaaaagaataatgttattgttcgtcctcgcattattagtagttgtggggcttggcgggtataaactttataaaaccattaacgctgcggatgaatcgtacgatgccctatcccgcgggaataaatcaaatcttcgcaacgaagttgtcgacatgaagaaaaaaccgttttctattttatttatgggaatagaggattacgcgactaaaggacaaaaagggagatcagactctcttattgttgttaccctggatcccaaaaataaaaccatgaaaatgctgagcattccgcgtgacacacgtgtgcaattagctggtgacacaacgggaagcaagacgaagattaatgccgcttacagcaaaggcggtaaagatgagacagttgaaactgttgaaaacttcttgcaaatcccgattgataaatatgtcacagttgattttgacggatttaaagatgtgattaatgaagtcggcggtattgatgttgacgtgcctttcgatttcgatgaaaaaagtgatgtagacgaaagcaaacggatttacttcaaaaaaggcgtgatgcatttgaacggcgaagaagccttagcatatgcccggatgagaaaacaggataaacgcggagactttggccgtaatgacagacaaaaacaaatcttaaacgcgctgattgaccgcatgtcaagtgcaagcaacattgctaaaattgataaaatcgcagaaaaagccagcgaaaacgttgaaaccaatattcgcattactgaaggtttagcacttcagcagatttacagcggctttaccagcaaaaaaatcgacacattgagcattacaggttctgatttgtatttagggcctaacaacacatattactttgaacctgatgctacaaatctcgagaaagtcagaaaaacgcttcaagagcatttagattatactcctgatacaagcactggcactttcggtaccgaaagttcaacagacgggactgacagctcaagcagttctggcagcactggcacaacaactgacgggacgacgagcggaagcagctattcgaatgacagcagcacaagctcaaacaacagtacaacgaattcaacaactgattcatcctattaaaaaatgcccggtccttttaaaggatcgggcatttttgcgcagaaaaaaactccggcacataagccggagtttttaattccttttcaccagccgtttataaaactttgtaaacggcttaaatttttcattcacgagtcctgtcacttctgctatgatttgcataaaaataatcaaaatgaagataataaacaaagaaagccaaattgtggcacttttaagtacaatcgcactgatactgaaaataaatccaattaaataaataactaagaccgacatccgatgtgaaaggccaaaggccatcagtctatggtgaatatgcgacttatccggcgctgaaatcggctgtttgtttaatattcttctgatgatagcaaatgttgtatcaaaaatcggtacgcctaatataataatcgggataacgatactgaacaatgtgacacttttatacaggcctaataatgaaagaatcgaaatactataccctaaaaacagtgatcccgtatctcccataaagatttttgccggatggaagttgtaaaacaaaaaccccagcgtgctggcaataacgactaatgagagtgacagaatgagcacttttccgccggatagcgccatgacagcaatcgttgacaggccgataacagaaagaccggcagcaaggccatccaatccatcaatcaggttaattgcgttcgtgatgccgacaatccataataccgtcagcggataagccatccatcctaactcaaatcgttctgttaaaaaaggtactgagaaaaagtccatttttaagccagtgcttacaatcataatggctacacctaattgaatcaaaaacttaacttttgcacttaattgatatttatcgtcaagaatacctaacacaataatgatgaatgctccgactgtaattgccgtcatccttgtttctgtgtaaataccggatgcaagcacgcctgcaaccaccccgataaatatggccagcccgcccatgcggggcatgattttgtcatgtacttttcgattgctgggctggtcaactgcacctattttaatcgcaatcctttttacgattggggttatgattaaaactgtcagcagcgagacaataaacgcaacaacaatgcgaatcatgcgttcgtcaagcataaagaagtctcctttggaattaaatgaagtctttatttatatagagaaccgttccttccattataccttctccttagttattataacaagcttcatcaaaaagaaacacgtataatcaaaaaacgcgcatcccaatttataggactacgcatgtttttgaatccctgtatacttcataatttgtctaaataagcaattccaatcttgtgtgcgagcgatgtttcggcgcatttctttataggtttcgtctccgttttgtccgagaactttttcacaagctgctataaaatcaattggatgatcaccttctacatattcgtatacatacggcttttgcatttttgaggttgacggaagattagtgcctacaacaggttttcctgccgctaaaaattcaaatagtttcagcggaaacacagcttgattatacggtgattgtttatatggcatgatgccaatgtcgataagctccatataatgaggcacttcttttggatctgccggaccggtccatatgacatttggaagcctcagcagctcttgaaacgaaacgtcaccattggtggcatccgggccaacccataaaaatgtccaatcaggcttttgcagggcggcggctttaatcattttaaaatcgagcttcggtttaatcccgccaataaaacctaacactgttccttctctcccctgcagtatactgcgatcgggagcttgtttatttgcagaaaacagctcatactccacaccgttttccacagtatgaaccttttctcgtcctgcagtcagttttttgtctacttccttgtgaagataatctgatgaacaggttattgaatctgctcgttgtataattctcagctctgccgatttaatgacttttcgccggaattcagacagcagatttgatcggccgctgatcggcgccgcccataagtcactgcagtcataaatgacctgatcccaaggatacagcgaagacagcagcgggaatccgggaaacgtgtaccataaacagcaacgttcaccgtttgcagaagcaggtgtaagctcatcgagtaatggggagagcttatgtctgtaaaagacatctgtatatcgtccgaaacgaaacatttttttctgcagcaggtctttgacaacgaattgcctgatgccagaatggacttcttgaaattctttaccttgggcacgcggagccggacatacccaaataacttccttcgtttcctcctgagcagctaaaaattctgccagccggtgccttctgtatctcaattggtcttttccccattcagcagtggcaacgatgacatgaatgattgcttcttttgtttccaccttcatcaccttttctctctgtttgcggctataatctttttttcaccgcgttttttgcatattgaacaaaacaccatgttgctttcataaaatgaagccgttcgatctccctgtagacaaaccacgtttttttcgcagccttccatttgttgctggaaattgagttattgacaagccgatattcagccaggcattcattcattccataggcaataaatcctttttttaaaagagacagccatgtggctaagtcctgtctcgttctgatattcggcatttggatctgtcccgtttgctccctgtcaatcatcaccgtcaagcagccgataattgtatttttcagggcgtcatcgtacgtcaggctttccggcgcatgaataaatttatcgagtggggtcccgtcctgcgccattaagctgtagcccgtgaaagaaaacgcacaggagcgctccatcataaactcaagctgcttttccagtttgtcttttttccatttgtcatcactgtccaaaaatgctacgtagcgcccttgagcgcgttccaacgctttgttgcgagcaaccgcagctccggagttctcttccaaatacaccacatgaattctttcgtctattttttcatactgctgtaaaatgtcgcgggtcccatccgttgagcaatcatccacgataatcatttcccaatgaggatggctctgatctaataccgaatgaaccgtgtcttcaatatagtcacgcgcattataggaaggtgtaatgacagatacgagaggtttccaattggtcatgatcacatctccatcgtatgattttaaaaggattccctgaaaaattcaggaatgacaacgaacataaaggcaatcgtaaggccaatcataacgccgagaactgctttctttttcggagacattccgccgcctgctgtctcacttacggtttcggaatcagtaacacttgccgctttcaggttaagctgtgtgtttttgagctcatacaaaaatctctctttatccactttggaatcctcgcttaccgactcgccttcaagcgcgtctatgctgctgcggatgacggcttctctttctgcatacagcttttgatcgtttttgaggaaggtggaggaaatggcttttaagacagattccgttttatccttatcctcgtcgctatagcttaaagtcagtaacgatttggattccgttttgattgtaagcttctctttgatctctgctacatcttcatccttttcatcaggaagcgcctccttcaaaaaggagtcgctctttaatagaagcggaatctcttctgtgctgttataaaccggatgatcatagctccccacagccaaagtatcttcagctgtatagctcttttgatcagcgatctgtgacggcaggatataccccgccgcacctaatataattggcaccgctatgatccaaatgatatttttttttatgcgacgggctattcttatcaatatatcgttcatataagtctccctgctttttgtagtctgttttatctgtacatcggctcaggcatttgtctggatcgccttaacacattcacggccgcgatgacgagcgccataaacacccaatggaaaaataaatttgaaacagagcttgggctgatacttgataccaggaaactgaccatagcggtaataagtccttctgtgatcagttttgactgattttctaattttctttcataaaacttgtaaagcacccatatgaggtaggcataaacggacagatatcccagcatgatgaacaagccaaaattagcaagaatttcaacaagccagttatgcacctctgccacattgtcagtatcatatacagcataatgctcaagataataggatacatttcctgccccgactccgaatccgtatgaatcaaggaaaaaatgccaagcgtttttcagcagatttgcccgagccacatttgatggaagcctgtcatgaaatgaatgcagcgtctgcggggccagaaacagctcccaaaactttgaatagattttgctggcgaaaagaactgcgaaaagagcaattcccgccgccgacagccatatagccattctctttaaaacaggcggcaatacaatgaagatgtagacagcaatacctgcaaaaatgcccagaaggctggctcttgaaccagtggcaaaaattaaatacaacgcacagagcgagagcacaaggccaattgccttgatgtatccattcttaatgtttttcatcatcgtgatgtaaaaaaagaagctgatggataaaaaggtcgcaaagtcattttgattaaaaaagaccgatgtcggataatgctgcttgtactccggtccgctgtacaatgtggaactcgcaagatgatggtgggtgatatgattgtaaaaaccaatgatcatcagaaataccgtcatcaccagccaaatggcataaacaatcatcagccgctccattttttgcacgtacatgacaataagataaatgaagaagattcccattgccaataaggctaaatacttgaggccaactgttaccgacttggcccacagcagagaaacaaggccatatataaaccaaaaggcgaaaaagagtaaaatcccttttacttgcagcccatgccatctttcaatatgggttcgattccgaaccatgccgaaaatatgaaggcaacccgctgcaatgagcagaagccggtaaaggaacaaactgaaaaatccaagatgaatagcgaaaaatgcattatttaaaaaagtgcaggcgatcaaaatatagattacagccataaagagccgttcttttgttgtaaatgcggttgcaagcgtcagtaaaaacaggccaattgccaacaccgcaagcacaacagccatctgcatgaaacctatatctttatggatggctcccagcaataggacgactccaaatatagcagcggccagtaacgctagcgtatggaccgctgatcgtttgatactcacatgtttaacccctttcctgatgtttcaggagccggcggccgagcctagcagccggcagcttcaaccaagtaacactttttctttttataaattgacgcttcccaagtctttagccaattcttcaagcggcaagcccggaaaatacttgtcagagggttccgttccccgaacagcgggacggccgatagagtgataaatgtatccggctgcctgcatctcttcaagtgaaaataaatttctgccgtcgatgatgactggctgttttaagaggttttttacttttacaagctccatttcttttacttccggccaatccgttaaaatcaggcatgcatcagtgtcttcaatcgcagcatacacatctgtgtaatactcgacctgttcgccaaggatcgctgaagcttcaggaatagcaatcggatcgtatgcttttacatgggcgcccagctgctgcagcattgggataatatcaagcgctggagcggatctcacatcgttcgtattcggtttgaaggctaatcccaggactgaaatggttctccctttgacgcttcccataacagtcaaaagtttatctacaatatgaacacgctgcttttcgttcgtttcaatgacagcttcgatgagcttgaatggatagcctgccgattttgcgatttgaagcagcgcggttgtatcctttggaaaacatgaaccgccgaatccaatacccgctttaaggaactttctgccgatacggctgtcaagaccaacaccatcagcaacttttgaaacgtctgcgccaactcgctcacaaatgtttgcgatatcgttgataaaggaaatctttgtcgccagaaatgcattcgcggcgtatttaatcatttctgcactttctaggtttgttttaatgacaggagcatggaatggctgatgaagttcctcaatgatggcagcggctttatgacttgttgaaccaatcacggcacgctccatattcatcgtgtcatgaatcgctgacccttcccgaaggaattcagggttagatacaacatcaaatgagtatctcccctttgaggctttttgaacgatagattgcaccagtttccctgttccaaccgggactgtgcttttatttacgatcactttgtagccgttaagatgctcaccgattgttttcgccgccgctttgacgtacgttaaatcagcttcacctgttttggacataggcgttccgactgcaatataaataatatctgaggcccgaatggcggacgggatatcgttcgtaaaggtcaggcgctgatccagcacatttttttcaactaagtctgcaagccctggttcatagattgggattaccccatttttcagacttctgatttttgattcatcgatatcacagcaaacaactttattgccgatctccgcaaagcaagtgcctgatacgagtcctacataacctgttccaatgacagctatttttttcacagcgctcatccctctcctgtaaaatgatcttcctatttatattggtcgcagtttcttacgattaaacggacgttttcgtgaccgtctgatactgatgatgcaaggccttggcgttttttcctgcgtcaaattgagcctgcacggtttcatacaagtcatctgctacttccggcttccatatttgctcatgttcgtaccgagtgatcgcttctgccaaggcttgagcggatttcggtttaatcagcagatgttggtgctttccgaacaaagacgacactccgccaacatccgtacagataacaggaacccttagcgccagcgcctcaatcacaacagtcggcatcccctcactgtaagaaggaagcacgaatagatctgccgcaagtaaatagtctcttacatgatgattcggcacttggcctgtgacgatatgccccttctgcgtcagcgtcgattttgcgggaccatccccgacaaagactgcctgaggtgggtcctgcagcgattcgatcgcttcagacagttcaaaaatgcctttctctctgaccagccggccgacatagacagccagacgctgatcaagcgggagtccgagtctttctctgatttcctctttcgtctcctcattctcctgaaaacggctgagctgtatgccaattggcaaaaccgagctgtcaaagcccgaaagctttttggcttcttcctgaagcttgtggctgactgctaaaacaactgacgcagaacctacggcacgcttgaaggctttaaacgctcctttgctgtaatgcggatagacattcacatcactgccatgcaaggtcaggacataaggaatttgcgctgactctgacacgactgccgcagccccgcccgatggcatggcaaaatgagcatggatcagatccggatataggccgcgctgtttcatggtttttaaaacggctgatgcgattctccgatgaggctgcgcccacttcagctggccgggaactgcccgatagaaaggccggtaaaccggtatcccctttctaacctcatactccggtctggcatccttttttcgatatgtctttttcagcatgcggacaggcgctgaatgaaaaggccgtgggcatatcacagtgatatcaagcccgagtttttgcagctcttgcacctgtgtctcatgaaacacaccctctccgggtttcatactgctcggatatacgcttgtgatccacaaaatcttcatgacaaacgtccttttcttagtagtttgcttttcgtttgagggtacgcttttaccaaaagaaagagatagcacagcgccccggccgcaactgaaatggccagccgcatttctgcctgcatactgaagtgttcggtactgaggcttacaccaaacgcgatgatgcccatcgccgcagtaatcagaaatggcttcataatcgactggaaataagctgaaaggttaagcttgatgacatatgccaaaagccagcgcccaatcaggaaattaacaacgctgataatggcatacacccatgcgactgtcagcaggcttcccgtctgtacagctgcaaacagtgataatccgtacagcagcagcacgccggaatcccaataaaacgctaagtcagctcttcctttagccagcagcacagatccatttggattcataagcactcttagtattccgacaatcgccagaacatttaggatcggaacagcagcaagccacttttctccgaaaaccgctgtgataaaggcgtctgacacagacacgagcccgattaaaagcggaaacgagacaagcgccagcatttttgtcatattcagaaagccttctctgatcacgctgttttcatatttgttttttgcgaaaacagggaatgccacccgtgtgacaatcggattgatcttcaaaaccggaatggtgacaatctgataagcgaggttataaatccccaatgcttcagcaccaataaaccggccgatcaaaatcatatcgatatttgctcccagcctgttcacaagacgggatgaaagctgaaatgctccaaaagaaaagaaatccttcatgcctctcaaatcaaaaacaaaagcaggatgccaattttttcggtatactgcccaatataaaatccctttactggactgcagcaggacttgagaaatcacgtacgccaaaatcgcatccatcataaaaaccgctatcgctaaatatccgaatgacaatacatttgaaaaaatctctattttgcttaacgtattaaaatgcagctgcttttgcagcatatactgatattgctgtccaattggcgcgatcaaaaacataatcgccagaatccgaactagaaacaccagctcttctctttgataaaatcccgcaatgacaggactgctcacatataaaagaacaaacagcaaaacgcccgtcataatgttaagccaatacaatgttgacagctggcgctccgtcgcgtcgtctctctgaattaatgctgctccaaaacccatatcgagcacaatctgggcgaaaactgtaaccgttgtgatcatgccgacaagcccaaattctgttaaggtcatcatatttccaagcagggcaaactgaacaatttgtatgattgtaatacacatggttgaaatacttgtccactttgcaccgctcatgatttgttttgtaatacttggcatcatattccctacttctttttaagctcagattgatggtgaataatggcattccgttttatcttgcaccatcacccgtccaaactactttacaagtttttaacataatttttaattctaaagtgaaagtcagattgcgaatgtaatataaatcaaatatcagcttttccttcggcgtcatatcgtaaccgccgttcacttgagcccagccgctcaatcccggtttaacagccagacgctgtgtaaagcctggaatctcattctggaatttttccgtaaatacgggccgttccggacgagggccaatcatactcatatcgcctttcagcacattaaacagctgaggaagctcgtcaattctcgttcttctgataaaagctccgatccttgtcactcgcggatcttgcttctgtgcccaaaccgccccagacttctcggcatctattttcatggaacgaagcttataaagcttaaatggtttcccgcctttccctacgcgttcctgcgtataaatggcaggtcccggcgtctccaaacaaatcaaaattgaaaataccgcaatcattggcagcgcaatcgccaacccaatgagcgcaaaccaaatatccattacgcgctttattgccaaataacgagccgtcttttcagataatgtaaaagaatgtatttgctgaactgagaattcacgactcacattcatgcttttctctgcactcactgacacacacctcacgatttgtttgggatgttatgatgacctatgccagtcagtttagcagacggatgttaattggatgtaaatggtatgttaagaagtgtgaattacgtgttttttctgataaatgttgttaatactcttttactattttatatacaagtcctatttgttttaatcatttcatataaaaaagagacaaatctgtgattagatttgtctctttcgattatctgtaataagatactgtgccgtcatgaatagcttgtgcagctttatctttataaaccgcttgcttcaatttacttgcatctgatgcattagtgataaaggcagtttcaactaaaacactcggcattttagaatatttaataacatagaaagcggctgtttttactccccggtctctcgttccaagattagccgctaactttggttgaatttgttcagccagtctcttgctatttgcagcttgatatgttgtatcgtagtacgtctcacttccatttggtgatgagctatcattagcatttgcatgtatactgataaataaatctgcttgtgcagaagctgctttatttactctctcctgtaaagaataaaaagtatcattagatcttgacagtactggaagagcacctgaagtatttagctttgtattgactcttttcgctatatcaaggttgacttctttctcaaggagtccattgccgattgctcctgaatcttgatcaccgtgacccggatcaataaagattgtttcacctacaactggattctttagctgattagcaaccttggtgcttacggcaggagtgtttccgataatcgtaaagtttgacatgtttttacttccaataattttacgggctcctgtagataaattttcaccatttgtaaggataagagattgcttcttcttagctgccagtgtagctcctgcaatagagtcagggtagctgaatccattgcttacatatacgatgcttgttgataaattaagtttttgtacgatatttgcagcaagctcatatctgtttgaaccactaattcttgtaggagaaggtaacttgttgtataccgtattgctgatacttccagtgcctcctacaacaacggtactcgaaattcccttatcttttatcacagacgttgtcgcactatttatagatgttttatttgtaaaaagaattggatacccgtttttcgctgcataaggaatgacggccggagcgtctgcatataagaagccattcaaaataacagcttttgaagtcgcacccatcgcttttgccacccgtgcagccgtatcataacggttgcttcctgcaattcgtttaatacttatccccaaacttttaatctggttagcagtgttagatgaaacagcaggtgttccgcctacaataattacatttttagtctgcatctctttcaatcttgttttcgtttcatatgaaagcttatcagaattagtgtaaagcaatggcgcattcttctggtaagcaaggggtgctgctgaaatagcatctgcataggaactcccaccaacaattacagctgtacttgctgttgaatacatttgctttgatatttgtacagcagtgccgtatctattgcttcccccgactcttttcactgaattatcggccaaagctgttggcacaaaaagtatgagccccagaaaacacattgttaggacttttatataagaacgcaattgatttcctccttaagtggcgttatatcctaaaataatcaataacttgtcagagttgtacctggatagtaaaatttcaaaattgaactatatgaatctccagcttctgctcttgcttttgctccatattgactcattccgatcccgtgaccatatcctttaccgctgattgtgtactttgaagtatctttttttacagtcacataagtacttttaaatacagtcgctccaatcattgttcttaactcacttgttggtacactaatggttgtaattttgctcaagttataggagccagtactgcttttaacaaaatacttcactttcatcgatgctgtttttgcacgctgcccttgtgtcgttccactaaagcttaaatcgtcaatacttgcaattttgacagaatcagcgcttgtttctttatttttcaagatccagttcttaactccggaaagtcttgcagaatcagtttcagtcgctgaagaccaccaagaagaaggcttcgttaagtccaaagatttcgtatctagctgttgttttgacaaagtaagcgtccagcctatttgaggatcctttgtatctttttttgcaatcaagtaaggtacacttgatgaccacacttcattactagcttctgtgtaaccaccattactggaagaataagctgcagttataagagatccattatatttcagaactttccccttcgtttgctctaccgctttattggtattcgaattccaactgtagccaccataaacttgaaaagcggttgtatcaggtacagtagttcctgtttttgttattgagtaggttcttgcagcgacagtctgtgctttaagagcctcaagtgaccagctagcaggcatttcattcggaattactccttttaagtaatcctcaaatggaatattctcatttaccggtcggatatatttagtagactcaatagagaaattaaccgtgccaagatactgctttccatcaagactaattctgtttgaagtagaatagttttctggtttaattcttagggagtttccgtaagttttgatgttttcaaggtttaattttccgctgttgatttttagattataggtgctaccgtcagctaaataaaattcatcagcaagtgaattctcaacttcagcagaaattgaactggtacttccaataaagtcgtatgcatatgtggctttatctttcgttatacttttagccgcagccggaacgctatcttgtttaataaataaaatttggctgtttttcttcgaggcaagcgaagcgcctatcagtacgtctgcatattttgtcccgttcgtcattacgactttatcagccttcaactttagttgcttaattatatttgccgtaagttcatatctggttgatccaggaatcctttgcacagttgaagtttttttaatttggttttctacactatcactgacgctaaatgaactgcctataatgatgacttgttttggcaaattataatccggaagcttgtctttctctgtaagcaaaatagggtatccgtgtgctgctgcatatggagcaatggctaaagcgtcttgaaatactcttccggttacaacgatcgctttatcatagctgcccatttgctttgcaatattttctgataagacatatctattttttccgcttatccttttcacagcgccatatgatttcagcttgttttctacatcttttgaaatgcttcgcgctcccccaatgattaaaatattatcagggttaaacttagcaatttgtctttcagtagtttttgttaacgtgtcaggctgagtaaataaaactggtgcgttcagttttttcgccaatggaataacaggcaatgcatcaataaaaatatctcggttcaccaatatcactgtattaggatttttccactggctgttggatgcaagagtcgcagtttcgtatcgtgaagcgcctgcaaaacgatccgtaacagcaacattatctccagttactttataaaatcctgttggcgatagactgatgctagatttatttccaatataatttgacaatttaactgagatgtttgagtctgctgcaaaagaaactgatggaatcaataataagattgcagcaagtgaacacactatcaatcgtttgcaagatttcaaaatttcaggttcctccctatatcttagttggcacgttcaatatcttttaacagaagctgaccctcatcatttttttcatatgtaatcgtgaccttatctccactgttaaacttatcaagatcacttgtcgattcttcagtgatatcaagactaaccggctcattatctactgttacttctattgtatgagtatcagctaaccctacataagtaccttcttttgtttcaatgttactgtctggcgatacatcttcaccttgactcttttgactattaaccccgcaacccgaaagaagcaatataaagaacagtaaagcaataaattttttcatttttttcacctcattatattttatcgtcaacctattttatattttaaagaaaaattaagaaacaatgaaacttttttttataaaaaacgactattttaggatttcattcttgtattaaatagagttgtatttattggaaatttaactcataatgaaagtaatttaacagacgaggtgcaaaggatgagaaacgaacgcagaaaaaagaaaaaaactttattactgacaattttaacgataatcggacttcttgtactcggaactggcggctatgcatactacttatggcataaagcagcttcaaccgtggcaagtattcatgaaagcattgataaatctaaaaagagggataaagaggtcagtatcaataaaaaagatcctttttccgtcttaatcatgggtgtggatgaacgcgacggcgataagggccgtgccgatacgctcatttatatgaccgttaacccaaaaacgaatacaaccgacatggtcagcattccgcgtgacacgtatacaaaaattatcggaaaaggcacaatggataaaatcaaccattcatacgctttcggcggcacgcagatgacggtagacactgttgagaacttcctcgatgtcccggttgattattttgtgaaagtgaacatggaaagctttagagacgttgttgatacacttggcggcattacagttaacagcacattcgcgttcagttatgacggttattcgttcggcaaaggagaaatcacgctgaacggaaaagaagcgctcgcttatacccggatgagaaaagaagatccgagaggcgacttcggacgccaggaccgccagcgccaagtcatccaaggtattattaataaaggcgctaatatttcttccatcacgaaattcggagatatgtttaaagttgttgaagataatgtgaaaacgaacttgaccttcgataacatgtgggatatccagtccgattacaaaggtgcgcgaaaacatattaaacagcacgaactaaaaggtacaggcacgaaaatcaatggaatttactactaccaagctgatgaaagcgccctttccgatattacaaaagagctgaaggacagcctcgaaaagtaaaacaaaaagaagcttcgcacaatgtgcaaagcttcttttttatttgcctgtaaatgaatccggttgttctttccggtacccgtaatgaaacagcaattcttccacaatccggcgggaagcctctccatctccatacggattagaagcctgggacattttcttgtactcatcaggatcagttaacagctgttttgccagctgataaatgttttcctcatccgtccctgcaagtttcaacgttcccgcttccactccttcaggccgttccgtcgtatcacgcagaacaagaaccggtttcccgagagatggggcttcctcctgcacgccgcccgaatctgtcaatataaaatgcgatttcgctgcaaagttatggaaatcaatcacctctaaaggttcaatcagatgcactctgtcagaatcaccaaaatgcttctgagccgcttcccggacaacaggattcaggtgcacagggtaaacgacttgtacatcttcaaattcctctacaattctgcggatggccttgaacatgttttccattggctcacccaaattttcccggcggtgagcggtcaagagaatcattttatcctcacccacctgatcgagaacaggatgtgagtaaccatccctaaccgttgtgttgagtgcgtcaatcgctgtattgcccgttacaaaaatagagtcggcctttttgttttcttttaataaattgtctttcgcctggcctgtcggagcaaaatgcaaatcagcaatcgcccctgtcatctgtcgattgagctcttccggaaacggggaatacttattccctgtacggagccccgcctccacatgaccgacagcaatttgatggtaaaaagcggctaggcttccggcaaacgtcgtcgtcgtatcaccatggacaagcacaatatcgggtttgatatctttaaacaactcatccaatcttacaagtgcgttagacgtaatctctgccagtgtctgccgctccttcataatgttcaaatcgaagtcaggcttgatgtgaaacgcatctaacacctgatcgagcatctgtctgtgctgtgcagttaccgttacataggaatctatttcaggatattttttcaattcaagcacaagcggtgccatcttgatcgcttcaggcctggtcccgaaaacggtcatcacttttagttttttcatatttgtcacctggttttctgctatagtaaataaattcatactacatattctacatgaaaatgcatcattttaaatcatttcattcttgattcaaataaaatgatataagttttaatattaaggataaagcttgtttaaaaatggtttatccgatatcataaaaatgtgtaaaaacatattgaaaagggtaaatagagaatagtttaaccataaattttttcgatcataaggaaggtgccttttaaatgaaaaaagtacgtaaagccataatccctgccgcaggtctcggaacgagattcttgccggctacgaaagcaatgccgaaagaaatgcttcctatcgttgataaacctaccattcaatacataattgaagaagctgttgaagccggtattgaagatattattatcgtaacaggaaaaagcaagcgtgcgattgaggatcattttgattactctcctgagcttgaaagaaacctagaagaaaaaggaaaaactgagctgcttgaaaaagtgaaaaaggcttctaacctggctgacattcactatatccgccaaaaagaacctaaaggtctcggacatgctgtctggtgcgcgcgcaactttatcggcgatgagccgtttgcggtactgcttggagacgatattgttcaggctgaaacaccagggttgcgccaattaatggatgaatatgaaaaaacactttcttctattatcggtgttcagcaggtgcctgaagaagaaacacaccgctacggcattattgacccgctgacaagtgaaggccgccgttatcaggtgaaaaacttcgttgaaaaaccgcctaaaggcacagcaccttctaatcttgccatcttaggccgttacgtattcacgcctgagattttcatgtatttagaggagcagcaggttggcgccggcggagaaattcagctcacagacgccattcaaaagctgaatgaaattcaaagagtgtttgcttacgattttgaaggcaagcgttatgatgttggtgaaaagctcggctttatcacaacaactctagaatttgcgatgcaggataaagagcttcgcgatcagctcgttccatttatggaaggtttactaaacaaagaagaaatctaaacataaaggctattggacattcatccaatagcctttttttatttcaacatcaaagtcaatgtatgctcttcattatcaactgcgaagacctgatcaacggcctgccgcaaaaattaataatcccagacaaacacactgattgtagagttaaacaaactaaatgaaaacataaatacaaacatgcagattaaatagtaaatatcttgtattcaatgcaagctaagtaaacaccacttgctaaaagaacaatgactaaacaaccagcattacaaaataattaaataaatttgaagcaattacaacagaaggcagtgaactgtcggaaagttcattttggctaccatattaatcccttttaatttaagagccaggccctcaaattcctctattcggtcggcatgtccaaatatatccatccatcatttttatgatttgcagaaatgttcattatctcaattttcacgtttaacccttcgtcgaagagttaactctatagacttatttttttaaactggtcaaaaaaatcagtgtaataatccattgtataatgcacataaaatttgccccatggatggttttcaaaggaattatagcttttatttttaaataaatctatcgcctcgatatcattgaagctatctaatacatatgcgtcaaatttattccaaatcttattataataatcaacatcaattactttgatgttccctccatttataagcaattttttctgatcttctttatcaaaaaagtgatgaacgtttcttgcactatttaagataattttggttttagggcaatttaatctgacgtagttatagaaaagattaaatttctgtttccatagtgcaaaataattttcaaaatgatcttctatattaaaactttgttttttattttgaattgtaaatttataataattcgttttagggagagtccatctgttatttgtaacaaactggttatctgaaatttctacgtagccaaaatgcacatctgcgaaaaagtccaaaatcaaaatgtctggctgaacagatttaatctcggttagaaagctattctcaaaatccgtctttaaagtgtttttttcatgattagacatgttctcattatcaataacaatgtagttaggtttactcattgttgaaataatggacgattggttttgggtcaatacacaatcaaaaaaatttttataatcagcattaaattgagagttaaagttatcacgtgtaacacaactaccataaacagctacttttttcatttctttattccctctttaatattagttcctagactaataatttgttgataaacacgtttacagttttctttatccgtatacttataaaattgatttactctatcaatatatttggcatccattatacaatcgttttccatacaatttatcagcttatcaactaaagcatctttatcagcaattacttctccaaaccccattgaattgtaatcaaaataccctttttccaagtgatttttttcgtattggaagtaaaaaacaggttttttaagataagcaaagtcaaatgcaacggatgaataatctgtaactaaaatcgcactattattgaaatgatctcgataactttcattaatgtccgcaatcctcactgaactatttttgttgaaatctttcaactgctgaacaatatttggatgcgggaagaatacgatctcgtatcctttttcattagcctcattaatgagtttagcatcatttaataaattattaagttcattaaaataaactgagtttttaaagagtggtgagtaatctcttttccctgtttgcggatttatttttcctactaaatgatttctccatgttggcataattaatatctttttatgattatgattaacaagcttatcaaatctaggaaatccagttagaattacttctctttttgaataattataatgaccattaattatagactcatactcaggttgagcggctgtgataaatagtctaatatttttcttatacttattaagccatcccgaaatatcatctttcgtaattccatgttgaagaaaaacaaagttaaatttaaataagtccttataatatttcctcatattcacaaacgggttgactacataatcatctgcatgtgaagagataatttcatcggcaagtaaatgtaaaaatttgtgcttaggtgacccgtatgcaacaactggtcctatttttttcagcctgttataatctggactatctttactgataataaaatattttttgatgccgtcattctgctgcattgcatattcaaataatgcttcagcattatcatctgccttgttgattctatccataaaaagccatactcttttatttttctttattttatagaggtgttccataatctttcttacatttgatgctttctcagcacctattttattaaaggtcttaaaacgtctttgagcccgcttttcttttgctctaataatctgatttttatcttttagaactactaaattattaagtttatgatcgaaataaatccctataccatttttggtatagaaatcaactatatgtttatccagcgggaataatcgtccaaagttaatttttacttttattagttttccatttgatgaaatcatcatttcaatattcgagttatttgcaagctcaccaactgggatatcaaccttaaagcccaggtactctttaactggcttatttaagcaatataagttgtgtactgttctatcaattttttcggcatgatatatcttgtcattgacacatgctttcacttctaattctgcggcatcaaataatgaaccaaaattaccttcaagggttaaaatccccttttcaatgcttaatagctccattgttatagcttcatatctcatagaattaattaatttctctttaaaatataaattcacattacgattcaaaaagatctttttaaatacattttttttatttcgatatttcaatttgattaaaaaatattttctgtgcaagtttagagatttttgttcaaagattatgtcgtcatctataaatgcaagtattctttctagcaagtcaaaaaactcttcaacttccttatccgtcaaaacatcagttctgtcttctatatttattctccactgcaagtcataggcaatcatatactgaatgtatcttggaacgtatcctaaagttgtaatactatgattaattaattctcgagagaaattcttcaaataatccacataccattttttatcatttttacctgtttgagttgcagatgacgcatcttctcttcgtcgataattatattgtccttctgacacaataccgtatacttggcgcttcattataattttagtcagccattcactatcttcagcgtaggccatatcttcattaaaaaagtgatttttaacagcttcttttttcacgaatgaacttggtgctgataattgaattcctgtatgttctttcaagatatgaactagcctagttttatcaaatttataatttaataagtgtggaccacttgttttaccaaacatcatcattggaatagaaactacatcgactttagaataattcttttcaaaaaaatcatatacttttaaaagggttgaaggggacaatgtatcatcaggatctaagaaattaatatatttacctttggcatattttaaaccctcattacgcgcactacttgctccgccattctccttatcgataaagactatattttctggatacgcttctttatactttaagcaaatttcccctgatgcatcaacacttccatcgttgactaaaatcaactgtatatgatgctcaaaatcaagtgcctgatcaattatgcttgttattgcttcatctaaaaattcttcaacattgtaaattgccattataatagaaaagaaaaaattcttttgttccaagtttttcaatctcctttaatttatttctttttactcaagggtattagattctaatcaacttttgaaatattctagttaaaacattaactttttgaagatcaattaaattgttgtctttttcaacaataaacctaaaaaaagtaactcctatcggaagttttaattgatatgaagaatattttctatccctaactgtggttccccaaataactatgttcttatgttcttgcttgtttattaattttgcttttctcaattttcttccataagagatataaacactatttttatcgttaatcacagactcttcattactcaaacttaccattagctcaattgaaaatttattgactttccatgaagtaataacgattttttcattttctagtttccctaattgaataagtctgttgacaggataaccccatcgtttaaatgaaatgagatactcttttaaatatgttttcatgttttgttttacaattaaattctcatctatatatttcaaaacgtgaaataattccttaaaaaactcactctgttctatcttatttagcacttcataaaccttgttattgtttttttgaaaaataaataattttaaatgattaagaattaaacattgaacataaggtataacttcgctgtactcttctaatgatcttttaaccatttcaccatatccatttgtaagtaaaaaagtatacctgttttttttagaccacgaagtgtctactagagaatcctcactttttctttttctatagaaatatttagcggcaggaataaggccatatttttgttctttaattaaaaacgtattaataaataaaacatcttcccaaaaatccattttttcattaaaagcaagaccaagacgttctattgctttttttcgaaaaaatgttccacctatgtgataatgaatagcagtgtaattatcagttatgtttacaatgctttcaccacttttaaatctataattaagtgagtgttctccatttttattatcgaagaaaaatagcggcagtaccgctaaattaatatcggtatgcttttcaaaaaactttaatacctcagcaatagcatttagtgagactttgtcatcagaatctataaaccctatatatttactattatcacaaacttttaatccattatttcttgccatactgacattcggttcatcttgataaataattttaatattattcggatatgcagttgcgtattgttcacatatgttttttgaattatctatgctattattttcaatcaatattatttctatgtttttttcaaaattaattgtctgatcaataatactgtcaatggcctctcttatatataatcccgaattataaacaggcattacaattgaaaacaacatctcaagtgctcctttaaaataataagtttttatccgagtagtcttccacaactttttttgaatgaatcatcttttccaactaacaaaattggtcataaaatgaagtaatgttttcatcctgtttatagtctcttgttttatgtatggattcaatttacttttatgttgttttaaaaagaggtcccggagcacacttttcaaaatcataataaaaatctcttagtttatctctataaaatttaatatcgggaacataacgcctttttaaaccgacataataagcaaatactgaagaatagtctgttattaatatatctgatattaagtataattctctaatatcattatgatcagaaaaatcataagcaaaacccatgtattcagttaagttaatattttcagatacaagatagtggacccttaaaataacaatatattcattacttaattggtctttaagactttctaaatccaacaccatattaaatttatatttacctttaacataaaatgagttatctctttttattttcagcattccttcattgctattttttttatataaaaaatcgttcctcggatagccctattcaataaacgtctttttaaactgaaacgcatttttaaaaattttcgtagagtaagcattaagggaaatgagataaccgcatttactgacttctataagaaagtttcttttatattattcagtcttcatgccgggcatatgtactttatccatgtcatttgcatttaggggagttccgtgcccagtgtgcacatatgtagtgtttctcggttttagaacctatagcggcaagtggctgtttgttatccaatattttgatgtagccaaatacaacagccatttgagagagattttttcaaataattctcatctgaatcatcaaataaatctttgtctcttttatctacactccaaaatatccatattcatatttattcttattttcctcaagatactcgaaaattgctcttggattacagctgaattgtttgcctgaatagctttcgaagatgagtaatctttcgtttctgggcaaaagcccaattattctaaaaataattgagtatacactgaccaatagtcttctatatttcattaaaatctttgatttcattttagactctttaaatatcaaagaattaaatacttatctcagcaaacaagaaaaaaagaagcaactgaatgattcaagcctcttttagttagtgcgtctataaactagccatgtgttttttgatttggtagttgaaatggcttttgttcttgaaaggtaaactttccagcagcttcatatgtccgtagtgaaataaatcaaatgttccgtacgttatcactttcttcatgagataacatcaccttccaactgagagtaccagaaaaaaaccaaaaactttaacaggttgtttatcatttcgacatattttttacgtaccattaataatgaacaataatagcataagttcctataaaagttaagactctttaaaaatgttaatcaccagcatttttttgtatcaccgttgtattgttgtatattttttgcaggtccaatatcttatctataccctttataacgagttttctttttcggaaaaatcgattcttttgtcgcgtttttaagtgaaacgttttctttctgcaacaccatttattttgtacgcccttctcatattaatacatcgtcaaaacatgaaggaattgtaatacgaatgttaaaagttcctaaagatttttgcggtaagatagagtaaaacacacttgtttttatagacatatagatgaaagaaaggttgatacgatacaaacgaaacctattaattaattagataaagaaaaaaccgagcttcttgagaaagtgaaaaaagcttctaatctggccgacattcactatatcctccaaaaagaacctaaaggtctcggacatgctgtctggttcgcgcccaactttatcggcgatgagccgttcgcagtcctgcttggagacgatattattcaggctgaaacaccagggttgcgccaattaatggatgaatatgaaaaaacactttcttctattatcggtgttcagcaggtgcctgaagaagaaacacaccgctacggcattattgacccgctgacaagtgaaggccgccgttatcaggtgaaaaacttcattgaaaaaccgcctaaagacacagcaccttctaatcttgccatcttaggccgttacgtattcacgcctgagattttcatgtatttagaggagcagcaggttggcgccggcggagaaattcagcttacagacgccattcaaaaactgaatgaaattcaaagagtgtttgcttacgattttgaaggcaagcgttatgatgttggtgaaaagctcggcttcatcacaacaactcttgaatttgcgatgcaggataaagagcttcgcgatcagctcgttccatttatggaaggtttactaaacaaagaagaaatctaaacaaaaaggctattggacattcatccaatagcctttttttatttcaacatcaaagtcagtgtatgctcttcattatcaactgcaaaaacctgatcatctgtattcacaagaaaacgcttcttgctgctgtcatacaatacatcgctatcacttaaggatagtgacgccgggttgataggagaaatgttatgaaaaataagctctgttgctttatcattctccagtacataactgattttttcataatcaaaattcagcgtttttctgccgtcagccttatttccttcagtataaccattcaatttcgattgaatgctggtgctgctgtctcctaggaatttcagaaagtattcataggaagatgctgcgttttgcgagacataagacgtaaatgcagtggcatgcaattcagcgtgtttcatgttagttgcaacagcgctctgtttcacataataagagtgcccgtcaaactttattttcgctgcttgtttgccttttgcagctaccgttacttttgtaccgaatggcagtgtaacgtcagccttctgtttcaaaccctgatccttataagcagccgctttttcatttgctataaacccttgcttattgattgcagttaagcgttcctctgacttgccctttgcatcgccatgatggttcttcacttcattttgcggaatagcgccaaacgaagcaattgtacgaagcggggcattaaagaacatcgttcccgccatgaagacagtcagaatagacaaaatagcaatttgaatggcattggccagtgatttcggctttttcttctttttgcggaaacgggcaaacgcttcaggatcttctttcttcctctcttctgtctgctcttttttatatgtctctttttcttttttcgatagcttattaaaccagtcaataaacgctttgtactctttcacaaccgtttttgtttcatcaaacatacgaagctcgccatagtgcatccaagcaacacggtcacacatcttttcaatctgaccgattgagtggctgacaaagaaaatcgtttttccttgctttttaaactcatttattctgtctacacacttctgataaaacgtttggtcccccacagaaagagcttcgtcaataattaaaatgtcaggatcaatatgcacggagatcgcgaaaccgagacgcgacttcatcccgctggaatagtttttaaccggctgattaataaaatcgccaatctcggcaaattcaacgatgctgtcatacatatcatcaatttctttattggttaaccccatcatcaaacacttgagccggacattgtcccggcccgttaattggttattcaaaccggcagcaatcgcaatcagcgacggctggccgttcatttcaatttcaccgctggtcggcggaataattttagccagcaggttagacatggtcgattttcctgacccgtttattcctacaaagccgattgtctccccttcatacacgtcaaaggagacattccgcacagcaaaaaaaccattatccttagccggaaaaaacaatcctttaatcttgtccgattgttttttatacaaatgatactgctttgaaacatttcgaaacgaaacttttagtttcatcgtaaaatctccttacgtattaaagaaagtcaacaaacttgtctctgaatttcatatgcaggatagaacctactaacaataaaaggaatgtgaacaaccaaaagtacagcgtgtacttcatgtcatggaaaaaccatgctccatctaagaagctgttccggaatccttcaataatatagaatagtggattcaacttcagaacaggcactaattcggggtggctttgaccgagtttcgcattaacatcccaaaaaattggcaacaagaaaaacaaaagtcttgttacggcctgcagcaaaaattgataatctctaatcagcacactgatcgttgagttaaacaaactaaacgaaaacataaaagcaatcatacagatgaagtaataaatatattgtaaccaatgcacactcgggaacacaccattaactaggagtacaatgatataaatcaccatcatgatcatataactaaataagttagatgcaattgccacggacggtagagaactaatcgggaagttcattttagccaccatattaatgcgcttaaatacactatttgatccatcaagtatagttggactgatgaaaaaccatgggattaatcctgccagcatccaaataataaaaggcacttcgcccgctccggttgtcacaggaccgccctttctaatccccataccaaatacgaaccagtaggccagcatttggataagcggatttaagaactgccataagacacctaaataattcatttgatatttagacttggtttcataagccgccaatcttaaaattaaaggaaatgacgttatttgctctctgagtatacgcaacaaatcattcattttttatcttccttagacttaattgtttttgggaatctttctgtttaaaatttgaaagcaccgctgattattgtaacagatcctgcattttttttcacttctcaacaagtatctaaaaagctgccgaaatatcgacagctatacattttataaaataacctaaattattcagctttaaatacagtattaacaaccttttcagatgaacgtcctgactctaaatagcaaaacttatcatagaaaggaccaaaagaaaccggaagcttataatcaggcgatgagatctgcttgatagcctcaatcgtttcttcagtagtttttaccaaaggaccaggagcttctttttcaaaatcaaagtagaaaccacgcaacttatcccggtaggtctcgatgtcagggacaaagaatagcattggccgttttaaatttgcaaaatcaaagaatactgaagaataatcagtaatcagcaaatcagaaaccatatacaattctcgaatatcctcataagcagaaaaatcatatgcaaatccttcaaaaggacctaaatcaaaattctcagctaccagataatgcattcttaagattacgatatattcatttccaagctcttgtctaagttgatgcaaatctaaatcgagatcgaacttataacgcccttttgcataaaactgatcatctctccatgtaggggcatataaaataacctttttatcacgaggaatatttaacctactctttatcaatgatattgtttcctcattattatcattatgaagaaaatcatttctaggatatccagattcaatcattgtcttgttaaactgaaacgcccgtgtaaagatctcagttgaataaccatttggggaaatcaagtaatcccaattagaagcttccttgataaaattccttttatattttttggtgtttgtaccaggcatatggacttcttccatatccattgcaagtctttttaaaggtgtgccatgccatgtttgtaaatatgttgtatgactaggtttcggaatccataatggaagccggctgttaacaacccaatactcagctcttgccatagcgaagagccattttaatgagaggcgattaatgtaaggaattcccttttcatcaaaaggcgctgaatattgtttatttacactccaatacattttatactcagggtggttttcccgcatatattcgtaaatcgctctcggattacaactgtattgtttcccattaaaactttcaaaaatgactgttttccttttaactggcattctgctagccatcatgaatagagatttgtatgttttagtgattaacttgtttctcatttttgtgatcttttttatttttgatactaatctcttcttctttcctttaataaagtatttaatccttgttttcaggctatagtcgtttactctgatacctagagtctgctttttctttttcttaaagacttcataacgaactggtgtgttgtttgttttaataatacttactaatccttttaatttgttttttcgatctcctaaaacaagagcagtgctgttgaactgaatatccgttccttcatcgtcattgcatatatactccataaaaagacgataaacataacgtttttcatttgagaaaggaatttctttcaaaggcactttcacttcaaaatcatacagttccggaacaaaaccatctgctctcatgttttccaggccatgtgtttttctttctagcttgattggaaatttttcctcaataggtgtttctccacccttttttaaaataaggttcaagttttttatccgatattgattttcggaactcaggtaccccgcataacctgttatgcttatttcttcagagctaatctcgatttgatcaaatctgatgattttggcctctcttttcaccttaatagaaaagttgcctttatcagttgtataaggtaaaatcaaaagttctgtggtttgatcgacatgaaaggcgcgctcaattgaatttacttcagcagaaagacgcttcaagagtggttcctgctccgcatcttcatatttttttcgaaattcgacataaaaatcatatgtttgtcccatttcaacaggcataggcaaaacatgagcatttatctcagttttatactctaatgagccagtgttttgaagcggaaattcagattccgttcctgaacgtctctctttcagctttaaaaataactggtaatcctctaaaaattggtgttctgaatcaattgagattaacaattcaagacttcctaaattgtttttcaagcttttcaaaatacatttaatcacagtgttttcaatcattacttttttctgctcctctgtataaaagctctttcctttttgcttccttttattagtgtcaactactaaggacattacccaaaatattaactctcttttatttccgtgaccctccaagagaaattgcctttaactgttgtatagggctctactctatagccattattagtatctatactgtttcctgacaattttgtttcttcactcgaaagtcttcgcattgttttaatatggccatttgcattgaaaacaatataaaaatcaataacttgggttttattagcagctatcttttcaatatttacatctttttcgagatcaattacaaacagttgatcattttgtaagtttgttgaaataatttcagccttattctttctgtccaagcccactaaacgtatttttttaatatcattatgatcaaaattctcaatgtcaatttctattttagttttatcaaaatcctcagtataggaactaatagaaggatctttttttccaacctttttagagaacttctctctttctattcgcacctcaatcatctgattaagagcaaaagcccaattttcaatatagttgggtcttgaatatttttcagccattttaaaagcttgttctgaaaatttttgatgagtactttcatctttcatcaaagagataatagcttgacccaatttctctatattatactgttcaatgacatatccatttgctccgtcagtaactaagctccttgctccgtaatcataatcgtatgttacaactggacatccattgctcagtgcctccatatttgatagaccgaacccttcaaaatgagaggttgaaatggttagccaagctttttgaaactctgagtcagggttatccgtatagcctttcaaaaagacattattctgcagtttggtatcttcaatttctttttttattttttcgaaatcttcacccgatccgaatatatcaagttttgcttcaggaatttctttcacgactaaactaaatgcttttactgcatgtatcagatttttcatagatgcaagtcttgaaataatgacagctttgtatttttcactcggcacattcaatacagcgggatcaagaggcttatcaattgtatgcggagtaaagaaaaacgtctcttgttcccctgaaatcaatttaaaatcttctagctgctcctcagttataaaaaagacagcatccaaattatacatctgactaaatacttctttatagcgacccttaatttgatatttattgctgccgtaatgcttgttatgaataattgctccataataggaagaaggtgattttttcactttaaagacatgtttgtcttgcggtctgctgtccactaaaaacaacttaggtttatcattttgtttttgcagatattctatccaatattgacgcagttccgattcatcttttacttttatctcaccctcaagggagtaccaaataatatgagataattgaacatctttttcttcattgttccatacatagagtttgtctaaatatacttgattttggtcattaatatattcctgcagatacatcttgtttagctgcacatcataatgagtaacgagaactaagtttccgttcttcgtatattcctctctctttatgagctggtttttatcattccaatagtcgacgtaccggatagtttctccatctccgtagtaaattacagacatttcattgttcttcttaccaaacaatctcgacacagtttttgcaaattttcccattccaacttgcttttttatctggtcaaggcctatcctttcttcgtatgatcttttcccatttgttctaacacttaaaaaatcatcgaatagattaataacacttgtgaattttttatcaatcttaccgttgctgtacaattcatcaatttttgaagacaactctaaatcaaaacgaaacgttaagaaaaaggtgttttggttacactcttctccaaataattttgaacgcaataataatgatttcgtcagaccgccataattacttggcagtccaccagagataaaataataatccatgtcaggaatttgttttatattagattcactcaccgcatgtaaagacaattttttactccctttcggcatctagaatatatgatcattgaaatttatatctacccggatactttagtcacaaaaatcaatgtaagcatcaaaaagtacttcttatttcaataagaagtactttaattagatattgaaccaatgatatcaggatcctaaattataaaccagcaatttcctctttgatctttgttgtagagatgccttctgttcttgggaggtaaacaacctcacactgatctttgagaaagtcaaatttaccttcccagtcatcccccataacaaaaacatcaatattatgatcaataatatcttgctttttttgctcccaattcttttcaggaattacttcgtccacatatcgaatggtttctaaaattaatttacggtgctcatagctgtgataagcttttttttgcttttgtaaattgaattcatccgttgaaatagcaacaactaaataatcaccaagctgctttgcacgctcaagcaatttaatgtgaccccaatgcagtaaatcaaaagttccatatgtgataacttttttcatttaaagaaacgctccttcctaatgttaaacactattaaaaacactactgacgttagcgattaaattctaaaaacctgtttgtattccttatatcgacatatttctcgtatgtcttcactgatcattaattatagcataccgcctaaaaaaggttaagtactcatgaggagaaaaacattccaaaatatgtaattacactcagactccattggcaccaaggtctgttgttcattcgttcattcaattgtaaaattggaaacatatttaaatttaatgtaaagataatgttaatcctttgttgaagatttatgttaaaatataaggtagcttgattttgcttttagaaactctcggtttttaactatataaatagaatcttaaaggaaggaggagccagacatgcaaacagagactattcacaatattccttatgttaacagtaacttaacatcatttatcgattacctagagaaacattatattgatcaaaagattggtgctgtcatttccacagtcaaccctgaaattgcatttgcagctattaaagatcgggactactttgatgtactatcttcttcaaacttcattttgcctgatgggatcggtgtagtcatgatgtcacgtttgactaacaacaggcttcagtcccgaatcgcaggttacgatgtttttaaagaacttctgggcgttgctaacaaaaagaaaaaacgcatatttctgtacggtgcgaagaaagatgttataaaaggtgttgtatccaaaatttcttctgaatacccaaacattaaaatcgcaggttattcagacggttatgttcaagatcgcaccctagtggcaaaacaaattgcaagagcaaatcctgacatggtattcgtagctttagggtatcctcatcaagagaaattcattcataactacagacacttgttccctaaagccgtatctataggtctaggaggaagctttgatgtatttagcggtaatgtcaaacgggccccttcctggatgatacgtttaaatttagaatggttctaccggttaatcttgaatccatggcgatggaaaagaatgcttagcatcccaaaatatgctttaacggttttaaaagaagaaaaaaacaaaaaaactttctatccaaagcctgaaaaagatcatacaaaacagatttaaaaacgaaaactttcaaataaatggatgataaaaatgaaaataagatcactactggcgaattgctatttgtattttttatcagcaatcgccttttttctgcaatgggtgaaacctgaaagcaaagtgaccctcctgatctcattcgaagcaaacgcaaaagcgattcttgaggaatatgaacaaggacaatactcttataaacttaacatcctgtatacccagcaggcctctgctattgccgagagcttcccgaatgtagatgcatatttattacaagaaaaaaaccctatccatctcattaaagctgtatacctaatgtttaacagtaaagtgatcataacagataattactttctattaacaagtgtgttaaataagcggaagcaaacgaaatgtatccaagtatggcacgcaaatggctcactcaaaaaatttggtttggaagacattacaaacatgcaacggacgaaaactgatattaaaaggttccaaaaagtatacagttcgtatgattatttaactgttggctcagaagagatggcaaatatcttcaagaaatcatttggaataaaggataaccaattattaaaaataggtgtacctttaacagacccttattaccgagaaaacaagaaaaaaatttcagatactctaaacatacaaagaaaaaaaataatcctctatgcaccgacgtttagagattataatatgcaatcaattcaattgccttttacagaagaacaattaattcatcagttaaaagaagaatatgttttatttgttaagctgcatcccgccattcagaacaatattgatattaaatattccagtgattatattaaagatgtttctaattatgccttgtttgatctactcatggctgcagacatattaatcactgactattcttctgttccctttgaattttcgattttaaataaacccattcttttttatacttatgatttaaaactttatcaacagaagcggggattggttgataattatctttccataatacctggaagagcctgctatgacagtgaatcattaataaatgaaattcaaaccccatttaattattccaaaataaaagttttttccgatagatggaataagtattctgatgggaattcaagccaaaatttattgaatttcatcgaaaatttaataagctaaatgatgacacttgttcaaaacagaacaagtgttcttttttctcttgactaccgaacgtatgtttgctttaatgtaattagttgcttatggcagcaaataataatagaggtggtaaatttatgagaaaaaaagaactgtttgatttcaccaacatcacaccaaaattatttactgaactacgtgtagcagacaaaaccgtacttcaatcattcaatttcgatgagaaaaaccaccaaatttatacaacccaagtcgcaagtggattaggaaaagacaacacccaaagctatcgcataactcgtctatctcttgaaggtttacaattagacagcatgctgttgaaacatggaggtcatggtacaaatattggaattgaaaatcttaatggcaccatttatatttggtctctatacgataaaccaaacgaaacagataaaagtgaattagtttgtttcccatataaagcaggcgcgactttagatgaaaattctaaagaacttcagcgattctcgaatatgcctttcgatcatagggttacacctgctcttgatatgaagaatagacagttggcaattagacaatacgatacaaaaaataataataataaacagtgggtgacaatctttaacctggacgatgcaatagcaaataaaaacaatcctctttatactattaacattcctgacgaacttcattatttacaaggtttctttttagatgacggttatttatattggtatacaggagatacaaacagcaaaagctatccgaatctcataactgtatttgattccgataataaaatagtgctgcaaaaagaaattactgttggcaaagacttgtccaccagatatgagaataacttccgtgaaccggaagggatctgtatgtacaccaatcctgaaactggggcaaaatcattaatggtgggaattacaagtggaaaagaaggaaatcgtataagcagaatttatgcataccattcttatgaaaacttcatgaatcatgtacctatgcttcgatcccctttattaaaaaccgtggggcaccaagatacacctccagaaagatttcaaccatttatgcaaaccttcattttagagtataatgctcaaaacaaaaaatggatggttccgacttcaggttatttaccatcttacacatcaaatttagtccgaaatattactatcaatgcagatggaaacttgcaagtcacattaaatgaacgctatattagtttactgcatcaatcgatagaaggagatttccgcttaaaacaaaaggatatccgaatgggatcctggtattttgctggcggagaaaaatcaaatgtgcttgaaataggttttatgaaagggagtacaaaaatcagacccgatgatgcagccatctcaaatgcttcaagaatgagtatttttatgattgttgcggacaagattgaggtgtgataaacaaataggctgtagctattaaatagctacagcctatttgcaactttctaagttttttatcgatattccggaacatcaaaataaagtgtatagccgtccagcaatgaatacaggctgtacatgcggtttacttgtttgtacgcccagccgatgtctgttgcgtattgatgtgtcgctgtagctgaccatctcattttgtacagtgtgtcctgattgtaagctgtgttgtggatatacgatgagcctatgaatttagctccgccgataatggccgcttcaggtgtgaaccagccctgctcgtacgcatatttggctccgtagtaattcggattgctgtcgtatgctccaattccatacatgttgtatacggtttttccgttataggttaatccattggctaaggcggatgtcccgtttcctgtttcaagaagagcgtgtgagattaaatacagttcgttgatgctatattgattggcggcatcgataaatgcctttgctctccctgtcaggatgcctttacccgcaagcactttctgattgacctcagtaacgctgaggcccgctgtctgtgacagcttgagaaattggaagtagtatttgctgtctctggtaaagttatttggatccacgtattgaactacttcatcactgcttgcgtttcgccagcccaaattgatcttagcccagccgtttatctgtccgatgattttcactttatcgccttttttaaattggccgatcacgtttgtcgggctgacttccggcgttgaccggatatttagtacatcagccgtaacggttgatgttgctatattaatgtacgtgagcgatacgtaagccgctccgtctgtttgcggacttactgtcatttgtttttggaccatatcacgaagcgagagattgtaatttgttttcatgatttgcgggccgtttttgatcttcacgatagatgatgtccatccgtataattgttttagcttcgttgatgccgcagcagctgtatcattgcctgtgaactgctcatttacgctgattttataaagcgtattgcttttcgttgtgtagctgggggttacacttttcgatttaagataggttaacccattattcaatgctgttttgctgctgagctgtgttgtcacgattttgtattgtgtatatgctgtctggcctgtttttgatgttgtgactgcgatatgattttgtttgaaaaatgttaaaacgcggtcaatctcttcttggctgataatagcttcagttgtgatttgatagctgctcgcagctgtctgaccggttttctggcttgctgctgatatatgattcgatttgaaaaacgtgagtgcctgattgactttcgtttgatcaagcagagattcggttgtgattttaaacgtgccagctatttgttttttgacggatttcgcagaagcactcagctgatttttctttaatatgttcaagccctttgtgacttttgcttgatctgatgtttcttctgagatgagctgatattgattttctgctgttgatccagctgctgtttttgcagcttttacttttttctgagcaaagaaggctgctgctttgtttgcttgctgctcgcctaaaatctttgccgtcgtgatttgataagctgcagacgttgtcgtttttttgacgctggatgacgtgtaatgccattttttctttttaaagaaagtgtctattttttggagctgctgttttgttatacccttcatattcacggtatatgatgtgctttttccaacctgttgataactcccggatacgccagtgtttttcttgatttggctgatggcgtcctttactgtactcagccctttgaaataagctgattggacattgtatgactcaacggttgttttttgattgatggacttgtagctgcctgtgatgccagtgctctgtttcagctgctgcaatagagttttggcattggcttcacctgaaatggcggcagttgtaaacgtataataggcttgccctttcactgtttcctttaatgatgcctgcagcccagattccttttggaaggcgtttttgatctgcgctgctctgctgtctcccacgattgtgccagactgaatggttgtgacagacaccgtgtgtgtgatgggctgatacgagcttttaatccccgtttgcttggccaggctctggataagcgccttgacttttgtctcatcagcaatgtctgatgtcatgacgttcatatagggctgagctgctccgtaagcttttacagcgccagccactcccgtctcctgtttcagctttgctaggatagtgttggcctgtttttctccggagatggcacctgacgagatggtgacatatggctgtttgcttccaacaggacttgacgttcctgtaatcgatgtctgtttggcgagtccgctcagtattgctttcgcttctgattcgctatgaatgcctgaggcggaaatttggtaggtcgttgttgtgcctgaagcctgataggatgcatcccagccagtatctttttccagtttggcgacagcttgtgaggcttggctttctgtactgaacgtattcgacggctctactttatatagtgagtagtcggtatacgcggctgcctgggcagaaccagacatggcaaaaaaggcaagggacgcggcggatagaagcataggtgcgattagtctctttttcattccttctcctctttcttattctatgagtatataaaactagtttatttatcggcacgcggttgcttcatttataggtgaatcacttccattttctaataaaaaaaaaacttaatctcgaagtgagattaagtctaaatatgagacacgataagggtacaaggtccttttatcgtaaaatcgggcatttgagccggcaaaataaagtgatcgccttttttgagcggacatgttttgtcctcatacatgagcaaaccgcttccttctatcacgctgcaaatcagaaaggattcatcctgagccatttcagcttcgccattgatgtcccatttataaaccgaaaaatattccccttggacaaatgttttaatggttattccttttctagattctgtcgattcatctatatacccgtccacatggggaaccgtggccgcattgaccgctttcgcaaaatgaagctctctcggacttccgttgctatcaagacggtcataatcgtacacccggtatgtggcatctgaattttgctgagtctctaaaacaagggcccccttgcacaatgcatgcagcgttccgctcggcacataataaaaatcacccggtttaattttgattcttcgcagcaggccctcccagtcaccgctgttgatcattgtgacaagttcggtttttgagcgggccgtatgcccgtaaatgatttctgcgttttccttacagtcgataatgtaccagcattccgtcttgccgagttctccctcttcgttttctccggcatagtaatcatcagggtgaactttaattgacgtatcttccttcacatccagcagctttgtcagaagcgggaaccgatccccctctacgccgccgaatacttcacggtgttcttcccaaagctcgatcaatgtctttcctttatacgggccatttgcaacagtgctcggtccttttggatgagcggaaatggcccagcattcccccgttgattctgaaggaatactgtatccaaatctatctcgtaaagcggttccgccccagattttttctttaaacacaggcgttagaaaaatcggtgattgcgtcatgatccgtacccctcccctgtaaataactgatcatcattttcccggtgcgcccctcttacaaacgcccgtataagctgtcttttttccgatgacaacatatgtacaaagcatcatcttttcattaccccttcaaagaaaacgcttcctatctattatatcacgtcgaaaagaagctttgtttcagccttttcctcgataagaataattctccttttttgatacaaattaataaaaaccgtcaatctgtttacgaaggagagaaactatgcaaatcgactctgatctccagaacaatttagacaaactgaaaaaaacattgggacaaaacgacgatatgatgttttatacatttgctttcggagatagcagacaaaaggcgtgtttactgtatattgacggtctgacagagaataaaatgctggcgcaatacgtcatttctcctttacaaaaagaggcgttagcccataaggaatgctcgattgaagacttatccgccttttttttcggctttcaccacagcgttgtttctacaatgaaagaaatagagcagctcgttttttcagggcaagccattttgctcgctgatggctatcgcggaggattagctttcgacaccaagtcagtcgcaacacgcagtcttgatgaaccctcctccgaagtcgtggaacgcggccctaaaataggatttattgaaaaactgcggacaaacacggcgcttttgcgtgaacggacgagtgatcctaatctcgtcatcaaagaaatgacactcggaaaaaggaccaaaaagaaaatcgctgtcgcttatattcaggatatcgccccagattatgtcgtcaaagaagtgtttaaaaggctgaaatcagtcaatatagataatttgccggaatcggggacgcttgaacagctgattgaagacgaaccattttcaattttccccacaatattaagcacagaacgaccggaccgggtcgaaagttctctattagaagggcgagtgtccatattagtggatggtacgccgtttgctttgattgtaccggctacggttgacgaatttattcattcgcccgatgattacagccagcgctggatcccaatgtcacttgtacgccttcttcgttattccagcatcctgatcaccatttatttgcccggtctgtatatttctctcgtttcttttcacaccgggctattgccgactagaatggccatttccattgcaggcagcaggcttaacgtaccattcccgccttttgtagaggcctttatcatgatctttacgatcgaattgattcgagaagccggattaagattgcctaagccgattggacagacaattggccttatcggcggcgttgtcatcggacaggcagctgttcaggcgcaaattgtcagtgcgcttatggtcattgtcgtttctgtcacagcactggcatcctttaccgttccttcatacgcctataactttccgctgcggatcattcggatcggggttatgataagtgcaacagcgcttggcatgtatggcgttataatggtttatctgtttgtgatcggccatctcatgcgcctgaaaagctttggacaggattacattatcccgatcatggcgcagcctggacaggatttgaaagacacagtcatccgtattcccacgatgtttttaaaaagaagaccgacacgaaacgatcccgaagataacatcagacaaaggtgatggctatgaggaaatcagagcataaactgacatttatgcagacgctcattatgatcagcagcacattgattggtgccggggtgctgacccttccccgctcagccgccgaaaccggcagtccgagcggatggctaatgatactgctccagggcgttatttttattatcatcgctctgctttttttgccttttcttcaaaaaaacagcggaaaaactctttttaagctcaacagcattgtagctggaacattcatcggctttctattgaatttatatatctgtctatatttcattgggattgtttgctttcaagctcggattttgggagaggttgtcggattctttttgttgaaaaatacgccaatggcagttgtggtgtttatatttcttgcagttgccatctatcatgtaggcggaggcgtttattcaattgcaaaagtatacgcttatatttttcctataacccttattatttttatgatgcttctgatgttcagctttcgcttgttccagcttgattttatccggccggtatttgaaggaggctatcaaagctttttctctttattcccaaaaacattattatatttctccggatttgaaatcattttttacctggtcccctttatgagagatccaaagcaagtgaaaaaggctgttgctctgggcatcgcgacttccacattgttctacagcattactttgctcattgtgattggctgtatgactgtggctgaggcaaaaacggtgacatggccgaccatttcccttattcacgcattagaggttccgggtatttttattgaacgatttgatttgttcttacagctgacctggacagtccagcaatttgcctgtatgctcggatcctttaaaggcgcccatatcgggttaacggaaatctttcatctgaaaaataaaaacaatgcatggctgctgactgcaatgctggctgcgacgtttttcataacgatgtatcccaaggacttgaatgacgtgttttattacgggacgcttcttggatatgctttcttaattgtgattacaattccattcttcgtctggtttttaagctggatacagaaaaaattagggagggggcagctacaatgaaaacagcaacaaaattctccgtcatgttttttatgctgctggtcctctgcgggtgctgggatgtcaaagatatcgagcaactatccttcgccagagggctggcgatcgatgagacagatgatcaccagtacaaactgacgtatcaaaaccttcttccccaaagcgaagacagccaagcatccggaaaacccgaatttgtcaatgtgacgtcccacgggaaaacgattctggaagcagtcagtgatgtatccatcaaggaccctcctgtttatagcgatcatttaaaagtcattcttctgggagaaaaactgatgaggaatcaaaatgtagaccaagtcctcaaccactttatccgagatgatgagctgcggcgaagcagctatttgatggcagccagagggaatgcagctgatgttctcacaaaaggaaaccccaatcagcagcagccgatgccctccgaaaaactgattgatttgacaactcacagcggatataacggtaagattatgataccgctgcgcatcggaagagcttctgtctactctcagaacgggtacagttatcttattcaagccgtgaaaaacgaaaagggaaaagccaagtatgacggagcaggcattatcaaaaggggcagcaataaactcgttgggtttctttcagctgatgaaacccaaacactgtcatgggtcatggggacgatccaaggcggtgtcatgccgacgacagataaaggacatccgattacgtttgaaatcaaaaagtcgaaaaccaaaattaagcctatcattgaaaacggaaagcctatctttcatatttctgttaaaacgaagggcatcctgacagaagaccaaaacccgaatgaaaactcctttagcaaaagttatttgcacaggctggaaaacatttttgaaaaaaagcttgaacgagatgtaaagcaggtaatggataaactgcagcacgagtataaaaccgatccggtctttttatcagaccacataaggattcaacaccctgactactggaataaagtaaaagggcattgggatgaaatattttctgagactgattttaagtacgatatttcttttaaaatcattaactttggcacggtgggaaagtaagcaatcaaaagggtgcgcatgatcgcgcacccttttttatgttccgacagtctgctgttttccggccgatcctccctgtccgtttttgtcccgtaaatcctgctcaatttcttcaaggctttttccctttgtctctgtcactttaaatcggacaaataagaacgccatgataccgatcgcggcataaatcaggaataaataactgattccgatcgcttccattaatattggataggttaatgaaacaatcagtgtcccaacgtgcaacattaaggtcgaaacaccggtcccgattcctctgacgtgaagcgggaacaattcaggaagcatcacccacacaaccggtccccagctgaccgcaaagacaacgataaacacgcctaaacaaatgacggtcgtccatgaggcagccggagtgttatcgaaaaagagatttactaaagcgagaacgatcaagctgatcaccatgcccgcattcccgaatagcagtaacggctttcttccaatcttgtcgataattttaatcgctactaatgtcatgagaacattgactgtgccgattccgaccgtgcctaaaatcgaagcggagtttccgaatccgacgtttgtaaaggtctttggcgcatagtagatgatcgtattcgttccgataaattgctgcaaaaaagcgagtcccaaacctgcaataagcgctgggcgcacccatggatcgaacagctccttcaggccgccttcatcctgcttttccgcttcttttatatcatgtatttcctgatcaatatcttttgtgccacgcaatttttcaagaatgttcttcgctttgctttcttcgccattcgtgaacagccagcgcgggctctccggcataaacaaaatgccaataagcaagagcaatgacggcacagcagccaatccaagcatccagcgccacgcttcggcatcggcaaatatgtaattgacaatgtaagaaagaaggatgccgaccgtgatcatcagctgattcagtgatgacagcgccccgcgtttatgttttggcgccagttcagataaataaaggggcacgattgtcgtcgatgttccgactgcaagtcccaaaatgatgcgaaacagcaccatgactcctgtatttggggccagtgccacaccaagaccgcctatacaaaacagcagcgcggctgccataattgctttttttcttccgaaacggtcagtcagcttgccggccgctcctgagcccaatatcgccccaaccagcaaggagctgacaacaagaccttctgtaaacgcgtttaagcctaactcctttttcataaataaaatagctccggaaatcactccggtatcatagccatataacgcgcctccaagagctccgaaaaaataaagccatatatttgactgctttttcataaagatgactccctttctccatcagctgcaatgacattgtctgtgggatttttttagaaatcttttagcctctttttccggccattaaacctttttattttgctgatcataagttttccaatcatttacttgtatttttttcaatgtcgccgaaacattttacctgctgcggcgtccaatataaggtgattcagtacatcatcgttatcaattttcaaaaacaagaacttataaatataggaatatttatcgaaaaatgtctttcgagtagttgccccatggcaaatagaatggtacgcttcaaatattaaagaaacgtgaggtattgatatatggaagaacgatcacagcgcagaaagaaaaaaagaaaactaaaaaaatgggtgaaagttgttgccggattaatggcttttttaatcattgcggcaggctctgtcggcgcctatgcttttgtaaagctgaacaatgcttctaaggaagctcacgtcagccttgcacgcggagaacaatctgtaaaacggatcaaagaatttgatcctggaaaagattctttttctgtattgctcttaggaattgatgccagggagaaaaacggcgagaccgtcgatcaggcaagaagtgacgcgaatgtgctggttacatttaatcggaaagaaaaaacagctaaaatgctgagcattccgcgtgacgcctatgtaaacatcccaggccacgggtatgataaattcacacatgctcacgcttacggcggcgttgacttaactgtgaaaacagttgaagaaatgctggatattccagtcgattatgtcgtagaaagcaatttcacggcttttgaagacgtcgtaaacgagttaaatggcgtcaaagtaactgtaaaaagcgataaagtcattcagcaaatcaaaaaagatacaaaaggtaaagtcgttcttcaaaaaggaacacatacgcttgatggggaagaagcgctcgcttacgtaagaacacgtaaagcggacagtgaccttttacggggacaaagacaaatggaagtgctgagcgccattatagataaatcaaaatcattaagctcaattccggcttatgatgatattgtggatacgatggggcaaaatttaaaaatgaacttatcccttaaagatgccatcggcctgttcccgttcatcacttcattgaaatcagttgagtctattcagctgacgggttatgattatgaacctgccggagtctattatttcaaattgaatcagcaaaagctgcaggaagttaaaaaagagctgcaaaacgatttaggtgtataatgaacgggatggcgattacgccatcccgttttacatatttccttgttgaaaattatcaaagtaacgtttagccttaatttatatggattatgtttcacaggcaagctgaacatactacacgaagcagcttcatttttaaggaggttcccctacatatgaaatgtattgcgattgatctagacggaacattactgaataaagaaagcgtcatttctgcggaaaacagagaggcgatcaagcgggccgttgatgccggcatcctcgtcaccatttgcacgggaagagcgacatttgatgtaaaagcgctgctggatgacttggacatccctatcattgcagctaatggcggtacgatccacgacacgggttaccgtttgatcagccggacattaatggatcaggaagccggtaaagcgattgctgattacttactttcaaaaaacatttactttgaggtatatacagatgaccatctgctttctccttttgacggcgaagctaagctgcacgcggagcttgacattctaaagagcgcaaacccaaacgagcagacggatgaattgtggcagggagccatgactcaattcaaacagtttggcattaaaccaatccctcatatcgaatcggtttttgacggcggtgaaaacatttataagcttctttgcttctcctttgatatggacaagctgaaacaagcgaaggaagaactgaagcatcataaaaaactggcgcaaacctcttcaggaaaacatattatcgaaatcctgccggcctcgtcaggaaaaggacgcgcgttaacaaagctggctgacctatacggaattgaaacacaggatatctatgcgatcggcgatagtccaaacgatttgtccatgtttgaagtcgccggacaccgaatcgccatggaaaatgcgattgatgaattaaaagaaaaaagcacctttgtcacaaaaagcaatgacgaaaatggtgtggcctactttatagaccagcttctttcaggacaatatgcataaagaaaagactccagagattggagtctttttcttttattgcacccgtatacttcctgcgtatttatccttccaatatgtgctcgtgttcatattggtgatggtcacgccgtttgataatgtaacgtgaacaacttgtccgtttccgatatagatggagggatttaagcttgttgattgaaagaacacaatgtctcccggcttcaggtccgccttctcaatcttagttccggcattgtactggcttattgcgtatcgaggcagggaaataccggctgctttctggtagacatattggacaaatccagctgtatcaaatcctgtctcaggtgttactccgccctgtttgtaaggcacttctccgacataaagcgtcgcttcggaaacaatcggattttctttcgggattgtcaggttgtcaaatcggcgaatacccgtcatcttcgatttccagtaatcctctgacaaataggaaatggttactttttctgaccggcttgcctgaatgaacctgcctgcgcccgcataaatgcctgcatgtgaaattcccgttttatacgtattgctgaaatagacgacatcaccaggctttatgttctgaggggctaccttctcgcccactgcccactgctgttcggctgatcgcggcagataaatgccgagtgcctgttgaaacacatattgcacaagccccgagcaatcaaagccctctgacggcgtgcttccgccaaacacatatgggacaccgatatatttttcggcctcctgaacgacaggaacatcagccgttgccggatcggcagcgattcgtctcgccccgatataagttccgctccaatagctgctttttttgtaattggtgatgataaccccttttgactgtgtactgtgaaccatttggccgtctccgatataaagggcgtcatgtgtcggaacagtgccggtgcttccctctttcttgaaaaacaaaatatcacccggcttcaggttttccggctttacagctgttccgattttatactggtcgtttacagatctcggcagatgaatatcagccttactgaacacatattgtatcaatcctgatggatcgaaaccctcttttggcgtttccccgccatatttatactgatatccaagcaggttttttgcttcactgacaatcaattctgatgatgtatcagcttccgcaatctccgcttttgtcataattggaaccaaaaaacaaatgataaccgccacaagcaaaaacttcttccagtttgccagtgtgttcacttttattatctcctcctctttttgcagttttaacatcggtatttttttgaatatgttaagagactttttaatatttttacagaatgaatatgctgggcaaataaaaagagagtgtctcctcagacactctcttttttgaattatttattggcgtttaccggttcttcctgctgctggattttattcatttccatatcaatcttctgtttttcctgatctgtcagctgatcattgaatttaaaagctgacataaacatgaacacgatggctacggcaacaaacggccagatggctttgacaaatttcatctttatcactccgtttatttagattttagtttgtcactatgatcaatatcaaacgtcagttttccgtcttctactttccaagcgaaattagagtctttcgtcagttcgcgaataatggttttctgtttaaggctgtcttttttcacaggtgcaggtgtcgcttcatggatatcgatcggtgtcacttcaaagcggcctgttccatttttcttcaggtgatactgaaccagtgcactgtctcttgttctcgtccagccttggtcaaagacaaagttgccgaggctgtagaaaatgacggttccgttatatacttcaatcggttctaagacgtgcggatgatggccgacgatgatgtcagctcccgcatcagacatggctcttgcaagctggcgctggcggtcgtttggatcattgtcatactcttggccccagtgtgactgcacaacaacgatgtccgcatgttttttcgcttctgaaatcatagggatgaagatttcaggatctgcgggcagcacgcccggcgtattctttttagccgcgaaacctttcccggacacatcggtaaagccaagcgttgcaattgttaccccgttgactttctggtacgaaattttctttttcgcatcacttaagctgtatcccgctccaacgatatcaaggttttgcttcgcaaattctccaagcgtatctttcatgccctgaacgccgtaatccattgcgtggttgtttgcgctgttgagaactgtgaaattcatgtccttcaagactttcactgattccttattcgtctgcagatgaatctctttatctgcttgtttataattcttttgataggttaccgggttttcaaagtttcctgctacataatccgaagctctaaagatcggttcaacatattgaaaaatactgtctgcccctttttgctccgttactttttcaacatagcgtcccatcataatatcgcctacaaatgaggctgaaagtacgtcgtcagaatacgttttgaccttcggcgtttccgcttttcccgcccacatgaaagcgaacataaggacaaaaacgatcggaatggcaataaatacgtgcttattggttttctttttttgctgttttgtcagctttagcagcttttcatgaaagctcagttcttttttcatcgtttgacacaccttacattaaattaagtagtaaacaaacatgatagcaaaggtcgctccgctcaatagcagcgtgcttccgaacgtaatggttaaaccttgtttctgaatggtattggcaattaaacctggcacgatgatgccgattcctcgaaattctgcgatttcaaatggtacaatcgggtatagaaaatcaaacgcgatttttaggacgatccctgttatcagcatggcagcgaattttctgcgtccgtacaaaatcataaatttggataaaccgtatttcacgataacataagtgagcaagctcactagcaaaacaagtaaaataaagaccggctgattaaacacaagtcctaaatatcccggtacaacaagtcctgccggcacgatccctgttttttccgcaaaaattaaactgagtagtacacctaaaattagtgcgatgtataaatctgatccgaacatgtttgcatttccccctagcttacgagctgcttaaccttgtattcgtggattttttcaattaaaggctctgcggcaccatgaatattgccgacgccatatatgacacggttgtgcattcttttctttaacaattccataatttcatctgttgacttatactctagatcatgcagtttgtctgcaggaattttgccttcttcgtaggcttttacgaccggttctgttgtttcaccgattaagatcagttcacttgcttcaatataaggcaatacgtcatttgcgaattgctgtgtccgatcgacacggtctgcgcggcagttcatgatgatgatcggatcatcggtcgggtaaccgatttcttttacacgtttccatatattcaaagtagaagaagcgtcgtttgcggcaaacccattaacaaagtgcccaggctcgctcggactgatcagcggaagaattctcattgctcccggatctggcggcgcattcagcattcccttaaatgctgtttcttcgtcaatgccgagtgcttgagccacacccagcgccagagaagcgttatcagggaataccatgtattcaaatttacgtaaatactcatctgtaatttttgagttatcagcaatgatgacttttgtgtttcgttcttttgctttttgtttaaagaactcggtatattcactatctgtaatgacaagatggccattataaggaattgtagcagtaaacgcttctgcaatttcatcaagcgtcggccccatgacatccatatggtcttccaaaacattcacaatgacgccgatattggcctgcagaagttcttcctgaaagatgatttgataatctgggttaacagccatgcattcactgacaatcgcgttagcccctctttctactgtttctctcatgacttctttttgctctccgatattcggcccctgaggtttccgtttaatcggcttttcctccggtgtgtcccagtaaatcattcttgcatctgttcctgttgtttttccaacagtcttgtaaccggcttctattaatattccggttgtcagccttgtcacagtcgattttccgcggatgccgttaatattcacccgaacagggagggcatcaatgtttttctgatgtcgtcgtttttctaatattccgatgaccagtatgacagcacaggctataatgagtaaccacattgcttttcgacatctccttctatattgttgtaaattcattcatcagtatatagaatcactatgaattctcaatcggcattatgtaacataatcttccctaatcgactaagccaaacttctcttttgaaagagattttatacctacaaactgttttctatttttggaaaacagcaggacttataccttatcacttttttaaaaaattgaagagaatgcgctttcatttttctcctgatatccttctggacgtatagtcacaccctgctgtttgtatttaatatgcatttcaaatcaatctttttttcagcctgtgttatcaagcatttcctgctatcatgcgtgtttccggttcttatgaacacaaaataattttatcctgtttcttaaggacaaggtcataatgtcatcctttctgcatggaataagcaatatgaggcccattccaaaatgactaaggaggttcgagatgaaaacgctaaacatacgagtccgaattctctaacataattaaacattttctgggatgatagtcttttctgtttctcaccatttacaggtctaaacgcatgactttgaaacaattttaataaaacttaatatttgttcaagaaatcttcatccatatttgtgaagactttgtcaaaaaaagagtgaaaaccttaaatttttcaattatatatacaatttacaagtagatttcttttgatatttttattgctaacttcggattgttcatgataatctatatatgtaaacggttacataaacaaggaggagctgttttggctacaattaaagatgtcgccggagcggcgggcgtttcagttgcgacggtttcccgcgtcctgaatgataatggctatgtacacgaagaaacgcgaacgcgtgtcatagcggcgatggcgaagctgaactattacccgaatgaagtcgccagatctctatataaaagagaatcccgactgatcggacttttgctcccggatatcacaaaccctttcttcccccagcttgcccgcggtgcggaggatgaattgaaccgggaaggctatcgtcttattttcggcaacagtgacgaggaattgaaaaaagaacttgaataccttcaaacctttaagcaaaatcatgtcgcaggcattattgccgcaacaaattacccggatctcgaggaatacagcggcatgaattatccagttgtttttctggacagaacactggaaggggctccttctgtgtccagtgacggctatacaggaggaaagttagccgcccaggctatcattcacggaaaaagccagcgcattacgctcttgagaggacccgctcacctgccgaccgctcaagaccgctttaacggcgctttggaaatcttaaagcaggctgaagttgattttcaggtcattgagacggcttcattttcaattaaagatgcacaatcaatggcgaaggagctgtttgccgcttatccagcgacagatggtgtgatcgcgagtaatgatattcaagccgctgccgttttacatgaagcattgcggcgcggaaaaaatgtgccggaggacattcaaattatcggctatgatgacattccgcaaagcggacttctgttcccgccactttctacaattaaacagcccgcatatgatatggggaaagaagctgccaaactgcttttgggtatcatcaaaaaacagccgctggcagaaacggcaattcaaatgcctgtcacctatataggaagaaagacgacaagaaaggaagattaagatgcgtaatatttgtgtgattggtagctgttctatggatttagtggtcacctcggacaaacgcccaaaagccggtgaaacggttcttggcacgtcatttcagactgtgccgggcggcaaaggagcaaatcaggccgttgccgcagccagacttggggcgcaagtgtttatggtcggcaaagttggagacgatcattatggaacagctattttgaataatctcaaagctaacggcgttcgcactgattatatggaaccggttacacatacggaaagcggaaccgctcatattgtgcttgctgaaggcgacaacagcattgtcgttgtcaaaggcgcgaacgatgacatcaccccagcgtatgcgttaaacgcgctcgaacagattgaaaaggtcgatatggtgctgattcagcaggaaatcccagaagaaacggttgatgaggtgtgcaaatactgccattctcacgatatcccgatcatactaaacccagcaccggcccgcccgctcaagcaggaaacaattgatcacgctacctatctgacgccgaatgaacacgaggcttcgattttattccctgatcttaccatttccgaagctctggcgctttatccggcaaagctctttattacggaaggaaaacaaggcgtccgctattcggctggcagcaaagaggtgctcatcccgtccttccctgtagaacccgttgatacaaccggagccggtgatacgtttaacgcagcatttgccgtggccctggctgagggaaaagacattgaagccgcattgcggtttgccaatcgtgccgcttccctttctgtctgctccttcggggcccaaggcggaatgccgacaagaaatgaagtagaggagctgctttcatgaaaaaacacggtatactgaacagccatcttgccaagattttagcagaccttggccacactgataaaattgtcatcgcggatgccggactgccggttcctgacggcgttttgaaaattgatctttcactgaagccgggtcttccggctttccaagatacagcggcagtgctcgctgatgagatggtcatcgaaaaagtcattgctgcagctgaaataaaagcatccaatcaggagaatgcgaaatttctagaaaatcttttctctgaacaagagattgaatacctttctcacgaggagtttaagctgctgacaaaagacgcaaaggcagtcataagaacaggagaatccacaccatatgccaactgcatcctgcaggcaggtgtacttttctagaaaggaggatgaaacatgcagattgaaatgaaagacattcataaagcattcggaaaaaatcaggtgctgtcaggcgtttcctttcagctcatgcctggcgaggttcacgcattaatgggagaaaacggcgccggcaagtccacgcttatgaacattttgacaggcctgcacaaatcggatcatggtcaaatcagcataaacggaaacgaaacgtatttttccaatccaaaagaagcggaacagcatggaatagcctttatccatcaggaactgaatatctggccggaaatgaccgttcttgagaatctatttatcggtaaggagatatcctccaagctgggcgttttacaaacaagaaaaatgaaagcgctagcaaaagaacaatttgacaaactctccgtctctctttctcttgatcaagaagccggcgaatgttccgtcggacagcagcaaatgatcgaaatcgcaaaagcgcttatgacaaatgccgaggtaatcattatggatgaaccgaccgcagcgttgactgaacgtgaaatcagcaagctctttgaggtcattacagcgttaaaaaagaacggcgtctccattgtctatatttcgcatcgcatggaagaaatttttgcgatttgcgacagaattaccatcatgcgtgacggaaaaacggtagatacaacaaacatctcagaaactgattttgatgaagtcgtcaaaaaaatggtcggacgggagctgactgaacgatatccaaaacgcactccttctctcggtgacaaagtattcgaggtgaaaaatgcctccgtaaaagggagttttgaggatgtcagcttttatgttcgttccggtgagatcgtcggtgtttcaggattaatgggagccggccggacagaaatgatgagagcgctgttcggcgttgacaggctggacacgggtgagatatggatcgctgggaaaaaaacggctattaagaacccgcaggaagccgtgaaaaaaggtctcggctttattacagagaatcgcaaggatgaagggcttctgctcgacacctcaatccgcgaaaatattgccctgcccaatctgtccagcttctcaccaaagggtctcattgatcataagcgggaggctgaatttgtcgatctgttaatcaaacgcctcactatcaaaacagcatcaccggaaacgcacgcacgccatttatcaggaggaaaccagcaaaaagtggtgatagccaagtggatcggcatcggaccgaaaatgcttatcttggatgagccaaccagaggtgtggatgttggcgccaaacgagagatttatacgctgatgaatgagctgaccgaacgcggcgtcgctatcatcatggtgtcatcagagctgcctgaaattctgggaatgagcgatcggattatcgttgtccatgaaggcagaatcagcggagaaatccatgcgcgagaagcaacacaagaacgaattatgacacttgccacgggagggcggtaatatgaaaacggaacaactgcaaacagaacaaaaacggattcacttcgacggagtcatgcaaaaactcggcccgtttcttggtttatttattctcgttatcattgtatctattttaaatcccagctttcttgaaccgctgaatattttaaacctgcttcgccaggtcgccattaacggattaatcgcgttcgggatgacctttgtcattttgacaggcggcattgatctttctgttggcgctattcttgccctgtccagtgctttagttgcggggatgattgtgtccggtgtcgatccggttctcgcgatcatccttggctgtatcattggtgccgtactaggcatgatcaacggattattgattactaaaggaaaaatggcgccctttatcgccacgcttgcgaccatgactgtgtttcgcggactgacgctagtgtatacagatggaaatccgattaccggacttggcacaaactacgcttttcagatgttcggacgcggttactttttaggcattcctgtaccggcaattacgatggttcttgcctttgtcatcctttgggtgcttcttcataaaacaccattcggacgccgaacgtacgctatcggcggcaacgaaaaagccgcgctcatttcaggcatcaaagtgacgcgcgtgaaagtgatgatctattctttagccgggcttttatccgctcttggaggtgccatattgacttcccgcctgcattcggcccagccgactgcgggagaatcgtacgaacttgatgctatcgcggcagtcgtcttaggagggacaagtctttctggcggccgcggacgcattgtcggcactttgatcggggtcctgatcatcggcacacttaataacgggcttaatctgcttggcgtttcatcattttaccagctggttgtcaaagggattgttatcttaattgcggtattattagaccgcaagaagtcagcttaggagggttttcacatgaaaaaggctgtatccgtcattttaacgttatcattatttttgttaactgcctgttcgcttgagcctccccaatgggcaaagccgtcaaactcggggaacaaaaaggaattcaccattggcttgtccgtctcaacacttaataatcctttttttgtctcattaaaaaagggtatcgaaaaagaagctaaaaaacggggaatgaaagtcatcattgttgatgcacaaaatgattcatcgaaacagacgagtgacgtggaagatttaattcagcaaggtgttgatgcattattaatcaacccgactgattcttcggcgatctcaacggcagtagaatctgcaaacgcagtcggtgtgcccgtcgtaacaatcgatcgatctgccgaacaaggaaaagttgaaaccctcgttgcttccgataatgtaaaaggcggtgaaatggccgcgacgtttattgccgacaaacttggaaaaggagcaaaggtggcagagcttgaaggcgtccccggcgcatctgccacacgggaacgcggctcaggattccataacatcgcagaccaaaagctccaagttgtcacaaaacaatcagctgactttgaccgcacgaaaggcctgactgtcatggaaaacctgctgcagggacatcctgatatccaagctgtttttgctcacaacgatgaaatggcgctcggtgctctcgaggcaattaacagctcggggaaagacatattggtgatcggttttgacggcaataaagatgcgctcgcttccattaaaaacggaaagctgtcagccaccgtcgctcagcagcctgaattaatcggtaaattggctacagaagcagcagatgatattttgcacgggaaaaaagtgcaaaaaacaatatccgcgcctctcaaactagaaacacaaaaataattgtctgatgtttaggaacctgcgataacgtgaatagagatatagaatgaattatttctcttacgtgaggagaggaacggcatgaacaaaccaacaaaactattttcaacattagcacttgcggctggaatgactgcggcggctgctggcggcgctggcacgatccatgctcaacagccagaaacaacggtaagcattgatgatttatacagttatccgattgattcttatttggtatcagcagaggctctaaatgtcagaacgaaggcttccgcatcaagccaaaaagccgatacgctgcacttaggagatagcctaaagctgatttccttctcaaatgctgactgggcaaaggttcagtataaaaatggaaaaacaggatttgtatccactcattacattgttaaagcagcgacaacggtaaaaaccaaaacaaaaacaaaagtatatacatccgctgacggaaagagcattaagactcttccagcagacacaagcgtttcttttttaggctggagtaaaacgaataaaggcggttttgattttgattgggtattcgttgattacggcggtgcgacaggttatatgaaaacaaaggatttacacatgacaaaataactgagagggattccgcatttatgcggaatcccttttattatgaattgatttgtcacattcccaagatatttctcaggaaatattgtcgtatgctgtgtcgaaaccttacatgatcatcaacatttttgttcacgctaaaaagcggaggtgtaaatatggatcaatttgaagcagcatatgaatcgtataaagcccggcaaacaactgtcgatcaagaaaatgttccatctggaaaagaagaaattattgcggttagaagaaatgaggaagacaatattatcgcagtgaaaaccaatacaggaagagagctcgactatcctactgcgctgtcagaagcaaaatcaggaaaactcgctcatgttgatgtcttccataaatacgggcgtgacattttgcgaagtgaaccggacggcatcaaggaaaataatctgtctgagctgccggatttttaaacaaatacagccctgccgtatgttcgacagggctttcttttaaacaaaaggctgctgaatgtattcggctaaccgttttgcactgtgtgaaatatcctctgcagctgcataattcacgccatagaacacatatggaggcagatacttcatgccgatcagattactcgtggcctgaaatggtttcaatagctcactgatcgagtaatgatttgctccgcccgcttgatatttttccgcttcgctccctgttgatacagccagcatcagctccttgccatgcaaggcatttccttctgaaccaaaagcccagccataagtcagcacaagatcctgccattttttcaagagcggcggagagctgtaccaatatagcgggaattgaaagacaatccgatcgtattcctcgcacagctgctgttccttcgcaacatctatcgcttcatccgggtattccttataaagatcccgtactgtgatattgtcatgtttactcaattcctcagcccacgccttattaacaactgaggtctccatatgaggatgcactgccaaaaccaatattttcatcagaccacacctttactgttttgatgttattttatctaaaatcaggaaaagagccaaataaaaagaaagccctgctaaaaggggctttctttttttcttttattcagggcttccttcagttgtttcgatatctttcgcaaaatcagggttatccagattcgcattaaagaaatccgctgtgttcggaagtctgagattcatgttcattttttgagaaatcgtaaccgtgcaatcctcaagcacatagtcaaaaacgtgtccgcctgaattgcgtccttcgtcaatgaagtgcaggtgatagccagaaacggcgattccgtttgcataagctggtgtcaagaaacctacaatcgttcctctcacgttgtcgaagttgaaaatcggctgtgttttaaccgcttcaaccattggcacgtaaggtttttcttgaagttctactgttcttgtctgcacctttttaaacaatccgtcaatgcgaattgcataaaataagtttctgcttggcagcatgctgttgatctctttttcaaagtcttcgcgtgtcattttcgcatcaattttgtgcgtcatgtccggtgtaaagaacgtaaatgaacagaacggtgaacggtctccattttggaccggtgtcgcggttccgtctgagcgaagacggtaaaattcgccgtcaaacccaatcagctctccgtcaagcttgttaaaggttccgataccgaagtctccatatttcggaatctctgacagttcaaaatctccgtcatatactccgtctaatagagaagtcattgttgatacttgataaatctggctcacaggctgatctttttgaccacggctgagcacttgaatgttgctttctcgtttcatatttcccttcactccttttatttagtgctgttcataaaacagtgtcgtgatgcgcagagtgctagagagcttttgttttcataagttccccgaattctttcggaagcttgtcacttgctaaattaatgttatcactgtagtcaaccgggacatcgatgatgacaggaccttcagcgttcatgccttgacgcagaacatctgccagctggtctggtgattctacgcgcaagccagttgctccgaagctttccgcatatttcacgatatcgatatttccgaaatcgaccgcagatgtacggttatattttttcaattgctggaatgcaaccatgtcatatgtgctgtcgttccatacaatgtgtacaattggtgcttttagtcgaactgctgtctctaattccattgctgagaataagaaaccgccgtcaccagagacagaaaccactttttctcccggtttcaccaatgaagcgccgattgcccaaggaagcgcaacgccgagtgtttgcataccgttactgatcattaatgttaacggctcgtagctgcggaaataacgtgacatccaaatggcgtgcgaaccgatatcgcaagttactgtaacatgatcatcgactgcattacgcaactctttaacgatttcaagagggtgcgctctgtctgatttccaatctgcaggcacctgctcaccttcatgcatatattgttttaaatcagaaaggattttctgctcacgctctgcaaattctactttcacagcatcgtgttcgatatgattgatcgtggacggaatgtcaccgatcaattcaagatcaggctggtaagcatgatcaatgtcagcgataatctcgtctaaatggataattgtccggtctccattgacattccagaatttcggatcatattcaatcgggtcatagccgatcgtcagaacaacatctgcctgctctagcagtaaatcgccaggctggttgcggaacaaaccgatacggccaaaatactgatcctctaaatctctagaaagggtaccggcagcttgatatgtttcaacaaatggaagctgaacctttttcaaaagcttgcgaaccgctttaattgcttccggtcttccgcctttcatgccgaccaaaacgacaggaagttttgctgtttggatttttgctatggccgcactgattgcatcatctgctgcaggaccgagttttggcgctgcaacagcacgcacgtttttcgtatttgtgacttcattcacaacatcttgcggaaagctcacaaaagcggccccagcctgccctgctgacgctattctaaatgcatttgtaacagcttccggtatattttttacatcttgaacttctacactgtattttgtaatcggctggaatagcgccgcattatccaaagattgatgtgtccgttttaaacgatctgcacggatcacgtttccagcaagcgcaacgacagggtctccttcagtgttcgctgtcagcagacctgttgccaagttagaggcacccggtcctgatgtgactaacacgactcccggttttccagttaaacggccgactgcttgggccatgaatgctgcgttttgttcgtgccgggcaacgataatttcaggtcctttatcttgtaaagcgtcaaataccgcatcaatttttgcacctggaatgccaaatacatgtgtgacaccttgctccactaagcaatcaacaacaagctccgcccctctgtttttcacaagggatttttgttcttttgttgcttttgtcaacaccctcactccttattatgcattttaaacgtaaaattttaaatatcttgtgataagtttcactatacactctttggaaattgacctccaatatcgattcgccttatgattaatatgtaatacgaattattaacctatggaaaggaatgcatattgaatggagcttcgccatcttcaatactttatcgcagtagccgaagagcttcatttcggaaaggctgcccggcggctgaacatgacgcagcctcctctcagccagcagatcaaacagctggaggaagaagtcggagttacgcttctgaaaaggacaaaacgatttgtcgagcttaccgcagcaggagaaatctttttaaatcattgccgcatggcattgatgcaaatcggacaaggaattgaactggcacagcggacggcccgcggcgagcaaggccttctcgtaatcggttttgtcggatcagctacatatgaatttctgccgccgattgtccgggaatatcgtaaaaaattcccatctgtgaaaatagaactgcgtgaaatatcctcgtctaggcagcaggaggagctactaaagggcaacattgatattggtatacttcatcctcccttacagcatacagctttacatatcgaaaccgcccaaagcagcccttgtgttttagctttgcctaagcaacacccattgacttctaaggaatcaattacgattgaggatttaagagatgaaccaattattactgttgctaaagaagcatggcctactctatacatggattttattcagttctgtgaacaagcgggcttcagacccaacattgtccaggaagccacagaatatcaaatggtgattggtttagtcagtgccggaattggtatgacatttgttccttcctcagccaaaaaattatttaatttggatgttacttatcgaaaaatggaccaaatacagcttaatgcagaatgggttatcgcttaccgcaaagacaatcataatccgcttataaagcattttattcatatttcaaattgtcagcagacaagaactaaagagagtgatgcaggtacatgaacaatacttgcaatctcttttttcttttgggattcttatggaatttttattaatttaatataatcgcttagtacaactttatatcagtatacgtatacatacagtacaaatagttggcaaggacatcagtaagcgcaggacattagtttgattttaaaaatgaaagatagagaggtgaagtaaattattgagttcaccggcatattcacattgctcgcttttttcgtaacaatgatttttattttctggagaccaaaaggactaaatgaagctatccccgccacatttggcgctttaatggttttattgtgcggaagtgtgtcattggcagacttaggggaaatcggaacaaaagtcacgggtgcatcggttacaatccttgccactatgattatggccattgcactagaaagctttggtttcttttattgggtggctgcaaaactgctccaacaatccaagggttcaggcatcaagcttttttggctaaccaatttgctctgctttctcatgaccattttcctgaataatgatgggagcattttgatcacaactccaatccttttgcttgtactaaaatatttaggtttaaaaaaacatcaaaaagccccatatttattaagcggtgttttaatagccacagcctctagcgcaccgattggcgtaagtaatattgttaatttaatttctctcaaaatcattggaatggatctatatcttcacaccgccatgatgtttgtccctagtatgatgggactcatttttatgacttgtctactgtttatgttcttttataaacgtcttcccaagaacctgccagatataccgggccattttcagtctctgcggcatagaaggtaccatcctcttcattcgccatcagctcctttaccagaacgaaatcaaacaaaaatcatgttgtttgtgcttgcatttgtttttctcgtcagaatgagtctatttgcagcatcatataccggtatttctgttcctctagtcgctgtcatcggatcttttatcctgttgagctggagatggatttatttcaaaacctccccaagagacttgttatataaatcgccttggcacatttttatattcgcttttactatgtatgtcttaatttatggtctgcataatattggattcacagagttacttgtgaattattttgaacctgtggtttctggaagcctcgcccatgcaactttcgcatcaggtatctctacttcagttttttctaatctctttaacaaccatccagcgttaatgatcagtacttttaccttaactgaaatgaccctgaatccttcaacaacaaaaatcatctacttggccaatattatcggcagtgatatcggttcattattattacctatgggaaccttagcaacgcttatttggatgcatatattaaaacagtatgatgaaagtatttcatggggcgaatatataaaaacgaccattatcatcattccgctgactgttctttttacgttaacatgtttatatttttggatcagttggttatttctttagcacagtatgaaacgaaaaactgccttctgctattcaagagggcagttttgcatacactagggaagatgcattgtctttagatgatttaacttccaaatgattggctctccatttgcgttaataagctcaatgatattattagagacatcctttaatagaccaactttttctggcacctctcccatatcaaatatgaccaattcaccaatattttttttgatctgctcctcaaaattacgcacaagaggaactttggaaggcatgacaggcaattgtgagttgtcaagagtgtacggtgtttgttcagttgaataaggggtaaaccattttaaatgatgcatagatataaaaagtattttaaatacaggtgagaaaaatacaatataatcgtttaaaacatttgtaacatacccatggatcgatcgacccccagttacataaacttcaataaactggcctttgaccttgtttaatgtatttctatatgaaaaagcttgagtttctgcctctatggatggatcttccggattgatcaaaaatggcttctcagtactggtcattattttcgccttgtttatttgatgaagatgcaacaagggaatataaagataattgcagccatcaaaaataacaaaaatatcctgtccgatatctatgagggtgccgacaaaccttgtatctcctgaaatgacaacctcaacatctgtgttaaggaattgattcaaacctttcacgattctcctcctttaactgaaaaagggcatcacttaatctgatgctcctccattatctattaaaatttacgtttccagtgatagtctatcgttctgacaatcgtttcatagctataatcatccttttgtttttctgaacttttgaaggaacttgaataacctggtgatcttgatgattgataatctgatgatcttggtgatcgtttagatgattttgatgattgataatctgaagattttaatgatcgtttagatgattttgaagaactttttgaacgtgacgaacggccagatttggatgattgataatccgaagattttagtgatcgtttagatgattttgaagaactttttgaacgtgacgaacgaccagatttggatgattgataatctgaagattttagtgatcgtttagatgattttgatgagctatatgattttgaagaaatgaacgaattgctgtccttatcattattgtcttcctggctttgttcatttttttgatcctcttttttgtacgacccttttggtcctaagctgatgctttttatgtgaaaaggatagatgcgaagcacctcttgatttttcactatagtataatggccgtcggcattatctacaaggataccctcaatggcttccggacctccacgattaattgaaacccatttatgagtcagactcttaaaaacctcgcttaaatcatcagcttccaaaactccaactggcgtctgctcttctattttcaaatcaggctcgtgtttacttatacttttgatgtgatggatattaaaatacactaccccatcctcatttgtgtttaacgcagcgtaatcatctcccagccagaccaatcttccttttttagattccggacccccttggttaaattgaactgattggtttattaaatgtccgattaagctatgaaaatcatcagcatcgagcatttcctcagtctcaattgtcgtggtgctattattggtatcctcagtaatacttttcacatgctccaactgataataaattatttttttttcagcttgtaaagctatataatctgattttacagctgttaattttccttttttagattccggacctccacgatatacagtaacaattttatctttcattgagtgcaaaaagttataatacgatatttcattatttgaatgatatttcattctcctcttgctcattcaaattcctcctagtcacttatacatagatgataaacatactgcatatatacgtgtcacatttatttgttgaactaattcaatagcctaattgtcgctttttccgcgaatacccattttcacgcattcataaaatacttaaatgatctttgaggtattgtgaacggtttttaatatactcgcagatcacatccggctcacggtcaaaacgctcaacatcattctttttatatgggtccatcaagataaaaggcctaatccgttcatacatcgccatgattttcggttccatatattctattgtaaaaagagattggagcgttttttctaacaggcgcttgtaggacttgcgaaactcggattcatccaatatccgggcggttagtgtattaaatccttgaattcttacataatcggcagccatccgctctccatggatatccctgccccaagtcgcatcataatcccaaggaatcacctcaaataatccggtttccccgcttctgtataatgcgtagttgtggacaaacccgtcatagtttgaggtgaatacaataccggcaagccagcgcaaatacttgtcgacatccacgtgttttgtcacttctgacttaaactgagctttagggaccgtattaattttaaaaatcatatcctgtaaataaaaatcatcctcctcagtccctgttttcttttcatatccaagctccagcgatgttttcgtttccctttctaaatcgctcatcagagaaaagttggcatcatcatccaccgcataaaaaatcgcgccatcagccagcttccttttcgccaaataatattcatctacggattcaagttcaagataaaccccttcattcttcccattcatctttacaaacacaaactctgcctttggagacagtgtccctagctccgagaaaaaatccagagacaatttgtttctcatcaaggaaggatctttatactccgcatttaagtgaatctctcgcgcgccgcggaatgttttcggctgataaaaggaaatatggtatgacttctttttgaagtctctgatatgtgatccccgataagcaatatcaatatccagccttttttgatttaccttcatcacagctggcaccggatcatcgtcccatatatccttttttaattcacgcaagtcttttggatgaacaaacagctgataaagcggtaaattggattgattcttcatccataatcctccttacaaattttaggcttttatttttataagatctcagcggaacacttatacactttttaaaaccgcgcgtactatgagggtagtaaggatcttcatccttaacatatttttaaaaggaggatttcaaattgggccactattcccattctgacatcgaagaagcggtgaaatccgcaaaaaaagaaggtttaaaggattatttataccaagagcctcatggaaaaaaacgcagtcataaaaagtcgcaccgcactcacaaaaaatctcgcagccataaaaaatcatactgctctcacaaaaaatctcgcagtcacaaaaaatcattctgttctcacaaaaaatctcgcagccacaaaaaatcatactgctctcacaagaaatcacgcagccacaaaaaatcgtaccgttctcacaaaaaatctcgcagctataaaaaatcttaccgttcttacaaaaaatctcgcagctataaaaaatcttgccgttcttacaaaaaatcgcgcagctacaaaaagtcatactgttctcacaagaaaaaatctcgcagctataaaaagtcatgccgcacacacaaaaaatcttatcgttcccataagaaatactacaaaaaaccgtaccaccactgcgacgactacaaaagacacgatgattatgacagcaaaaaagaatactggaaagacggcaattgctgggtagtcaaaaagaaatacaaataatctaagttttcattgtttcaataggctgccggcggaggtacggaagcctatttttttatttgccctgtattagatatatgtcatgacataacatatgcaacccgcatcatttggtttcctttaaaccatttcgttataatcaaggtatcctaacgataaaggcggttgttgctatgtacatatttcaagctgatcagcttagtgccaaagacacatacaagctattgtcaggtaccgttattccccgccccattgcatttgtgacaacactttcttcaggaggagcggtcaatgccgcgcctttcagtttttataacgtcgtcagctcagatcctccgcttctcagtatttctgttaacaggacggaaggacgccaaaaagatacagcgcgaaacgcagtggagaacggagaatttgtcgttcatgtcagtgatgaagccatcattgaagatatcaatgaaacagctgcaagcttaaggccggatgaaagcgagcttacacgcacctcgcttcatcctgttgaaagcaaagctgtttcagttcccggcattaaggaagcccgcgttcgctttgagtgcaaattagagcggcatattacctttgacaatgatcaaggcatcactacagcagatctgctcatcggaagagttgtctgcttccacctagatgaaaaggtgtatgatgcagaaaagggatatattttaacggatgaattaaagcctgcctcacgattggcgggaaatcactatgccaagctgggggaagaattcacactgattcgtcccagctgaagagaaggactatttaaatagaagaaactagtcaaaaagaccttatgattacaaaatatcgcctgtaaataactgaaaaaatatcaaaaaaaagaacacccagagcaagctcggggtgttcttttatgaaacgtttttcctttttcttcgtataaaggtagattaggaggaattggaatgacaaacttttggattttaatgctgatcgctattaccatcagtctcgcctctcaattttttataaagaaaaaatacggtattgataaatccggctggcgatataagcatgtcagcaatacacacaaatggatcgaaatcactttacttattttgtttgtgttttcactctccttttttccagttgaatatttgcttcttttattttttattgtgattgactcaatacgaatttttatggagtggcattatagacctgaagataaacagtatatgtaccacattgtagaggtctcacttatgtttatgcttttgatttatatttgtaccctatagttatttaaatccccacagccgctccgtctccccgaggatcggctccgccttggagaaagccttcttcatcaactttgattgcagccgcttgtcccatcagcggatcatagtcaccgacaacctccacgagatgcccgctgtctttcagtttttggattgttttgtctgtgaatctgccctcgactctgagaccttcgtattcctctccccacgttctgccccatacccagcgcggttcgctgattgcttgctgtggatgcattccgtagtccagcattcgggtaatgatggccgtctgagtctgcggctggccttcgccgccttgtgtgccgtacagaatttttggctttccgcttttacagaccatagccggcatcaacgtatggaaggtgcgctttctcggttcaagcgtgttgacatgattttcatccagtgagaaaaatgatccgcggttttgcagtaatatgcctgtatcaccggctgtgactgccgagccaaattcaaagtacaggctttgaatgaatgacactgcgttgccatccgcatcaattacggccgcatatgccgtatcacttcccaccggcctgctttctgccggttctgccagaatgccgatttctcccgccaatcgtttcgcataatttttatccaaaagcctttcaagcggaatgtcagcaaacgcagggtcagtcaaaaaggcattccgatctacaaaactctttttcagcgcctccacaagcacatgataatactcaaatgaaccgtgctcgatttgggtgaaatcatagttttccaaaatgttcagtgttaataaaccggtaaatccctgagaattcggcggcgcctgatacacactgtatcctcgataatcacttgatacaggctctgcccactcaccccgatgcgctttaaaatcatcgattgtcatgtaactgccgttattctgtaaatgtgagacaattcgctgagcgagatctccttcataaaatgcgcttcttcctttttcagtaatcaagttcagactgtctgcaagctctttttgcacaaaccgctctcccgggacaggcgctttgccccttctcgtgaagatgtcagccgtgtaaggcgtggaagccagcagttcaatattcttttctgtgtgacgacactgatcagctgatacaggaaacccattttgggcataatcgcgtgcgggctccaatacatctgcaagagacagacgcccgtactccttcaggaccgcatcccagctatcaaccattcccggcacggtaatggcactgtcaattccccgcagcggaatcgcgctttttcccttatatacatctctcgttacgttttttcctgaacggccgctgccattgtagacttttactgcctttgtttcctggtgaaaggtcagccaaaaggaatccccgccaagtccggtcatatgcgggtacacaaccgcaagacaagcactcaccgcaacagcggcgtcaaacgcgttgccttccttatccagtatgcggtttccggcttgagaagcgaggtaatgcggactgacgaccatttgctttgtaccgatgacagatctgttcatcacaagtccccttttttaagaaattttcttcagtatagggagcctgatttttcacatctactgatccggcagaaaaactgacgaactttcttcttttcgcaaataacaagatattttcgcattcatttcgaaaacaaatgaaaaattattatttcgatacgtaacttttatgataaaatgattgctaaaaggctacgaaagcaggtggagcaattgagtcatgaatatcaaatccccaaccttgtacttgatgagactgataaacaaattctcacgattttgcatgaagaaggcagaatttcttatacggatcttggcaaaagagtcgatttgtcacgggtcgccgtccaggcccgtatcaaccaattaattgaagccggtgttattgaaaaattcaccgctgtcatcaatcccgctaaaatcggcattcatgtttccgtgtttttcaatgtcgaggtagaaccgcaatttttagaagaggtcgctcttaagcttgaggaagagcctgcggtcaccagcctttatcacatgacaggcccgagcaagctgcatatgcatgggatctttgccaacgatcaagaaatggaagaattcttaacaaaacggctgtatccattgcgaggcgtcgtcagtgttgattgccagatgctgatcaaacgatacaaaagccgtatgggaatgaagctgtaaaggagagaaacgaatgaaaaaccatccttatcgggatatgacggccgcaatggttcgcaccggcatattagggttcggcggcggaccttccgtgattccgctgatccgccatgaagcggtcaataaatataaatggattgacgatgatgaattcggagaaatattagcaatcgctaatgcgcttcccggaccgattgccaccaaaatggctgcttatctgggctttaagctaaaaggcacattaggtgcagttgtggcgaccctcgcccacattctgcctacatgtcttgcgatggtgggcttgtttgcggctgtaaatgtgttaagccattcagcaattgttgcaggtatgatcggtgccgtcacgccggtaattgcggtaatgctcggaatcatggcgtacgagtttggccaaaaagcgcttaaaggtttcggctgggttaccggcatcctgttttttatcatcgcttttatcggcctgcaaactttacagattaatcccggcctggtcattatcattttcttagcgtacggggcgtttcattttaaactgaaagacaaaatcacaaataaacattcaaaagataaaggaatgtcagcctcatgatatcgatctatttatttatggcgttttttatcgcaaacctactgggatatggcggcggacctgcgtctatcccgctaatgtttgaagaagttgtaaacagatacagctggctctcaaacgatcaattctcaaacatgctcgcacttgcgaacgctttgccgggcccgatcgccacgaaaatcgctgcgtatgtcggctacagcgcaggcgggtggcccggcttcctaattgccctgatcgcaaccgtcgtaccgtcggcgctcgcattgatcgtcctgctgcgcatcatccagcgcttccgccaatcacctgtcatcaaaggcatgacgctgtccgtccagcctgtcatcgcggtcatgatgctcattcttacctggcaaatcggcgcagacggcatcaaagcgatcggctggatccaatcgatcgtgattgcgggaatttcgctccttgccatgacaaaattcaaaatgcatccggcatttttgattatcgcggcgtttttatatgggggccttgtgatccctcatttatagaaaaaagcacctggacaggtgcttttttattttggcccagaaatgccgtttgatatgacagctgtttcttctcctgcgtcactcttgatgatgtgcttgacttgcagcgtggttcctgccattctcacagattgcttcaactcggacgaattggtttcaacttgtatccaaacaggaggctggaccttccaaaataaatagagtgcaagaatcagcaagccagcaatgaccgacagcaaaaacttcatatcgcatcgcttcttttcagtaagcggcccgcagcggacagcgcctgatgatcacgaagaatatcgcctggacgattgccttctcccagcacatagcctttaaaggacattcccataaaatgaaaaatatgttcgaattgctgaatcagcggcagcccttttatttttggattgtctccgcccactgctattacatatgcctgtttcactgacatttgctgtttaaaatcaggaaatctcggatctctcaacgtctgtgaccagcgatcaataaacagctttaatgtccctgacatgccaaaccaataaattggggtggcgaatacaagaatatggcactgcaatatccgttcaatgatagaatcgtagtcatcttgaacaggacgaaagccgccttgggcgtgacgcagatcttcaattggctgaattcgatatttctgcaaataaatgtgctccgcatcgaatccttgaacagccttctccgcaagaacatccgtatttccgccagaccgagttccgccgttaataaccgcaattttcatgatgcatctgctcctttgtttacgaatgattttcttcatcttataatggattcatctatcaatacagatgattatttcgattaatccaatcgctaaaaccgatttagaaaggaagagaacaagtggaattgaagcagctgatcacctttattacggcggcagaacatgtaaacttcaccctaaccgccaaaatgcttaattatgcacaatcaagcgttacctctcagatcaaatcacttgaagaagaaattgggacgcctttatttgaacggctcggcaagcggcttatcttgacagaagcaggaaaaacgttcaaatcttatgcacagaagatcattgcgttaacagaagaagcgaaaatggccgcaaatcaagtaagagaaacaaccggaaccttaaaaatcggggcgacagaaagccagtgcacataccgcctgccccctatcataaaagaatttaaacaggcttttccccaagtaaagctcatattcaaaccatatatctccaatgaacaagcgaaagaacagctcttacagggccagcttgatatcaccttcatcttggatgtaaaccggatggaagacgcactgcacgttgaatctttgattcaggatgagatcaaaatggtggctgctaatgaccatccttttcctgcggatttaccagtaacattgaaggatcttcaaaacgaaactcttctgctgacagaggacggctgctcgtaccgcacgctctttgagaacaatttgcatgactccggtgtctatcctaacaaattggaattcgtcagcatagaagccatcaaacaatgcgtgatggccggacttgggattggaatcttgcctgaaatgacagtaaaagatgatattgcagcaggccggatgaaagaactcaattggcagagcgattgccccgttttcactcaattagcatggcataaggacaaatggatgtctgcgccattaaaggcttttatcgatttgacacggaaaacattcaaataaaacctctccacaaggacgacaaggtttttgagaccaggaaagcacacacatacaaaaaaacacttgatgacttagagccccaagtgttacatgtgatttttctgataaaacgttcgcaaaacatgcgtttcaaggtcagccaggcggacagggattggcaatctgctttcttgattgatcaagctcatcgtgatctgatagctgctgtctaaatcaatataattaccgcaagacaagaaaataggcttcacgtccccccgcgttcgcagcgcccggccatatacctcgccgtcaatgagaatatcggtgtatgcaccgacttcattttcaggcatcacgaaatcatagcctttgattttgagataggttttcgcaatcccaatcgtcggcttgcccagaaaaaaagccgcatgggtggcaacgcccatatgattgtaatgcagatatccgttgccatcaaacaagaagacatccggctccgtctccagctttttcgccgcctcgatgatcaaaggcagctcgcgaaacgcaagaaaaccggaaacatacggcacgctgattctccccatgctgtgcactttttcaatgacttcttttgtatcagcgtcaatcacgataatactgcacactccgtatggttctccgttctgctcccaataggcgagatcgacgcctgcgcaggtgttgatggagttgggatggatcgtgtgggataggttgatacgatttctaagggattgttgtgtttgaacaaaatccgattcatcttttagatgaaaatcgtgtatttgatgtatttccattttacttgtttccctctcttcgcgctcaattgtcctgcatgtcgattctagcaatgacaccaaattatatcattgaaaaaagcagatagtataatctgcttttttattactattcatttttcatttctttcataaaaatataatccaattgtttaattaattctttaagttcagtacacataatatcctctaaaggattttcccaatcttcgttttttatcagttcaatcccatagcttccggctggatcaccttctgggtaccaccctacgtcaagcagcaaattttttgtcttatgagaaatctgcaggagatcttgattaaagtcaaataaccaagcatcgtcatttgcctctagcgtcttaggatcagtatcctttaatgtaatataatcaacagtccaaccagccggtatctttagccttaaaaaattgggaatctgttggcttagtggctgtaaaccctctaaaaccccgcttcccacactccagatttgatattctaactcttctaataattgttctatctcattaaaagactcatcttcataaatcttatctgtttttaagccagctactttgatatggtattgattattttcataacttaccttaataaaggccttacgtttttcattttgtagtattagtaattcacatttttcttgcattcttttttctgaacataaattgttcagtactacagaccagccattacagatttttaatggctgcagttgagaaatatggtctctttccatcccgcttctccttgcactccatattgttatactatctataaaaaagcatgccgatgacaacacggcatgtttttaactatagcaattctaatacatcagagtaaacaaggcatctcctaatgttaatctcctgttgaaaggctgtatatgcggcaattcactccactcatacacagtatcgtagtaatcatacaaataactgagttcaataaaccctttctcttgcattattttattaatatagttcgttccctgaatgaattctaaagattcagcggtgcctacaatatcataaacgccatcgattaaatcgtgtcttagggaataactataatctaatacataaacaggaaccaatttagatactttcatattgatttgctgttctaaatgaaaaccattttccccagaaagatcttgcaaatggatatcaatttctcctgaaggattgtttaaatctctaacttcaatttttttcaaaccttttatttgattaaattcatcaggtacttttattttctctgcgcatttgttcttgtaccattcgcctaattccctattcacaaatagacgataaagcaactcaccaatttcaggatattcattaataaacctgattccatgttccataaatagtaaccattccatcctttaatcaagaaaatctaaacttcattccaccaagtagttgttacttgttttaaatgatattcaatatataaaatcacttttttatagtcatctgatgaaaattctttaataggatcttcccaatcattatctttgactagtaaaaccagataattaccttcaggagaaatgtcaggaacccagcctaaatcaagcgttattgaggattgttcatgataaagctgcaacaaactgtctgtgaacaaaaaccaggaatcatcattcggttctaatgttcttggatctatttcaacaaaatgattataatttactttccaaccttgtgttattcttaagggatgtatattagcttttggaacatctaatttaacatgttttctcatttatataacctctttagagagccgttattcttaaagtctgtttttagataacttgtcaaccaactatttgagtgggagacctgaaaggtgaaaatgtagattatgaataatatttacttagctgtacgaacttcattttacaaggctgccccttgcatctatattcatcttactaattatcttatagatcagtttcaatgcaaaaattttaagtttaaaaaacctcgagaggcaagcgccaatcgagggaaggttagtttttttctacttacttgttaaaggattaaaactgatattcttccagaaaaacgttatgagaacattagctgcatctcatattatctttcctctctgcacaagtgattatattcaccaaatttagggaaatcatcccagttgctcttaaggttgtcgctagtctcacgctcttcgaccgaaccggtcttgaaatctgtcttctccattgctatatgaccatcttcgcgaaagcctaaaatcaaactgctaacttcattatcagttgcatcatcatattcccaatacattgctgttcttaagaagattttaccatcacttataacttcaaaatcataattcagatacttacgagtcaagtcatcataaaaacccactgaaacccatttatttgttacatttacaacatatttaggtttttcgccttcggttaataccgcagtatatggttcatgtttttggtgatgtaagtatgcggtacaatcatcaagaatattccaaggctgtttttttatgtccgaccattcatcacaataataaactttcatagtcaattatacaccttcccatttatatccctaataataatcctattttttgttgcttcatcaagaattttttgtggaatagctttattttgaacaggtacttctaatatcaattcacctttcagtcatccgcctttaagagcttttggattaaaaggaccatttgatattttagaccctgaagaatattttttagtaatctcgttcaagtaactcagtgctgtcttttcttgaacgtcactaagttgagtatacttcctggaaactatctccttatttggagaatatgaatcaactacgtactttttgccgcctgcttcttttgcttctagctctacttcattataagggtaacgggggcgattttccttattgaaattatttcctgcttcccaccgttctttaagccaagacggtaatggattcttattagatgacttccccgtacccttaatacctttaccactactaaccatcttcacaatcccaagatccttaacagccgtcttttccacatcgacacgtactgtcgggattccgaatgtaaagccatccggagttacagggcgttctgcgtacacgtggacgtttgttgggactttgaattgttttactttctctagtgttttgtttgctttttggacttttgaatgggttgcaagcgggatgcctttatcaatatgtttcgccagtgcaccggctccaaccaaactcagcacagcttccagcgccccctgcttccgcttctcctcagacactttgtttccaaacatatcccgtcccgtgacggcttctgagaatccgtttgacgcaacaaggccgtatgcacccatttctgtcattttgagaatgtctaaggatttgcctgttttgtaggcgtctaaagcgtgttcagccgcgatagcagcttttccggttttgtagatggcttttccgcctttgaaggcgcggcctgcccagccgacgactggtataaatcccacggctgccatggtgccgactgtgacgcgttcaaagcctatacttatttacgctatataaaacagtggacaacaaactaataaaaaaaccttgaaaggcttcagtgccaatcaaggtagaaaatcaaaccaactcgaagcgtttatttgtttttaataatgccttaagattttttaacaatactattaattccttcaaatataatatctctcataacttcattattactgttataatttctttcatttcttattttattaaaaacctgctttataaccccatcaatcattattgttaatccttctatatcttcttcactaccctcctttttaaaactttcatttattattaccaagctatcatcttttgacattttattttctcctttactctctttctttctcattaaaaactttgtctatataatttacttcatcaaaaatccagtatctatcctcttcaggaatataactagtaaagtcttcccgaacccctgtccaattattaggaacataattttcaaaaggtaataactcaggatacagcgaaagaagcattttttgattaaagtctatatataatgatggccttaattctagaatagtactttcataatcctgatgttcaactaacttctttaattctgaagacgggataatatagtcagtatattcttttaaataaagacgataattatcttcatttacaactgaaatgttatttcttagagaaagagcaaagtccatatcaaaactaaacccgtttttttcataggcttctttatatttcatgatatctagtatccaaacatctctttctgttagataccatgagaattgagaagaagtctttaccccgactattatattttgggcatactccggttttaataacaacgaaaacaccactttctcattctatttttttggctgaatgcccatattcctctaaccactctatccatggttccgccggaagttcataactaactcccggtgtcgtaggatcaacaagctttggagcagttctcccctggttacgagggtttttagtatatccatactgatcaattactgtctccttgattaaatcatcaatctctttaggtaccttaaattctacaatttctccgcctggtcttgctacatctcgataatatttagcgtgttctaaattgtaagcacttatgtttaaatcagcatttttaataggaatagcaatgcttccatcactatttactttaattctatactgacttgttttatttcccgctcctcctccttgaactctgtaataacttactgattgttcgacaggatcgacagattttttacttgattgtaacttatcattatttactttcttcgtatataattgtttcttctctggctttaagtcaaatgtatggccagtcgaagtaacaatctgttctttatttatatgaccactttgcttaattttagaaaaagaataactcttatcaagatttcttcccatcgatagcgtattgtcaaccgacttcgccaatgcaccagcaccaaccaaactcaatgccgcttccagcgcacccgttttccgcttctcttcagacactttgtttccaaacatatcccgtcccgtgacggcttctgagaatccgtttgacgcaacaaggccgtatgcgcccatttctgtcattttgagaatgtctaaggatttgcctgttttgtaggcatctaaagcgtgttcagccgcgatagcagcttttccggttttgtagatggcttttccgcctttgaaggcgcggcctgcccagccgacgactggtataaatccggctgcggccatagctcctgctgtcacacgttctgcggtggagagtttttctccggtaaccggatcaacgccttcagttgctcttttataatcataatagccagtgacttctccagtaaagttgcaaactccatcccatgttttttcgtaccatggtttgtttgcttcttcctcggctttttcctggagacgtcttgcttctgcttgctgggcttttgcatcaatataggttgttccttgattttctacttcaatgacgcttttgtagacttcattgctgtggaaggcttttttgtcatagtacataggggatgcgctcttcccattgctggtggcctgcatgagaacagaatatttggtgagcactgcgttgtccagagattctaaattttgatattcagtggtcagggattcatcaagcttatcgacagctgtgatcgtgtcacgtctgactttttgggcatcgcccatcttatctgcatactcgtcaagcgtgtacatgtcgaggtcaataatatcgctgatgcctgacaaaatagaatcgatttcttctttatgagcggagactatctctgaggctttcaggtctccattgggcagctcatgatccaaaaatgaagtttccacatatgaatcattcagttcttgatctttaatatcgcctgaaatgccgtttaaaaatgcaatttgagcagagacaagcgtcagccagctgtcgacgatttccgcctgtccctgaaagaaatctttaatattgtccgcgccttttcctttaaaattatcgcctaaatctgcaactccctgaaacgcttttttcagcgtattcagctgctcttcaagcgtctcatattgcttttttctgctcttcgcttcttcgattaaagattttgattcaaatactttactcatcgcactgccctttctgttctattttaccgctatcgcctcgtcctgctctttaagtgaatctacgttatcctttgtatcctcgatatttttctgtaccgcttttttgtaatctccgagcatggttttgatgttctcctcacgctcatgatattttttcgtataatcgagtttattttttccattggaccccgcggcgccgattgatacgtcagcaagcgcatctttgacagactctaatgttttgattacagcatcgtatttcaatttaatttctgacataaaaaagatcaccacaatttaatagatttaatttgattaacagcatcctccaagaattcttcacccttagcaagagtatgaccagcaaaattcgctagctttaattctttgtcatagagaaatttcatagattccaactgaataatctccatctgaatcgaagccatatactcgttatatttatcattcacaatcttagatgcttccgatttcgcctcttctcttcccttgtcgaaatcatcggcttttgttcccgtccaatgcttgcccaattctggttttacaatttctttgatttcagtgattgcctcttcttgcagtgtgtctatgtccttttttgcttttttcagcttttcgatcttgtcttccacgtcggaaatttttccgttgagcgaacttttgatatccgccagcatactttcataacccatctgaatcacctcttaatactcaaaaagtcgtatggaggggctgatgaagatagacttttccatactttatttccatatattatattttaaaatagccagaaggcggcttaaatagggtaaatggcttaatttaggcatataacgctcttgaaatgtaggtatttgatcttgtttttgttcgttatacagctaatgaaaacgttttttaaaatgaaatcacctaaagtcatagttataaaggcacttgaaagaggcagatgttgttgatctgcctcttacggcgctgagcttattgttcatgtttatgttcttcatcaggtcggccacgtctgattttgtctttggcttctattattccccgcttctgaccctttggatcaaaagcttgtattagctgcagtcccagttgtacagaacgtttgaaaagtcttttttccttagatcgtcaggtgtgatgaaaaaattggcgatgccgacgtctccccacattgaatcgatatcatcgtctgaatcaatttgtaaaagcatgatggtgtgttctttatatgcgtattcccgtggatcatgctgggtaaaagaagcgtatccgccgattttatggccaaatccgttttcagccagttcattataaatgtcttcttcatcctcgccgaactgaccaaagaactccattgtttccatgcccgtatactgctcaaattgaaaatctgtaggcagcacccattccgaagatttcacaggctcgactgccgcttctgataaaatcggaaaatcacattcgcctgtgccaataaatgaaaaatcagaaacaaggtcgtcttcgttttctatgatattttcaaaatagatcactctgaaattcttttgttcacatcgatcgtcaaaattcaatccatagacgtcatcatgaagagaaatgtagaactgcaggatacctgaagaaggatagccgtcaagctggggaatgtgcgagaaattaatctgcgccagaagcttcatcggctgtccatattcgtcagtcggatatgtttcatgcttggggaaatagggatcaccggcaattttgctgtcatatcgtcctgttttcccttttctcacattcagtttcacgtattctttcgctgatttctccagcaagtcgcggtacggtctcattttttcgggtagatgattcatcagattctctccttttccggcatctccaaggttttattttctggttttcttcgtttcttctaatgtttttcaaacgattgtttaaagaagccctacttctgtataattttccaaacaatagttaaatagtagcaaatgtattcagcaccccgcaatagatgaaaaaaagactggtgcgcaaccagcctttctttttcaactattgaattgcacctgacggaacaaccgccttccgtccgacagaataatactccactcctgcagccaaagcctcatccaatgtgtagcagtttctgccgtcaaatatgagcggcgtttccatcaaatcctgataagccgctaacgggaattgtttaatgtcagcccagtcggttaaaatcatgacggcgtcagaccctttgacagcttcctcgatcgtctctttatattcaacagcttgcgggagaacatgctttgcatggctaactgcaatgggatcgtaggctctgatacgggcgtcgagcgcagcgagacggtctgcaataacaattgacggcgcttctctcatatcgtcggtattcggtttaaatgacaggcctaaaagggcaatcgtttttcccgtcaccccgccgagcctgttcagcgctttatcaaccagcatcgcctgctgattgttgttgactttgataaccgatttcagcagttcaaaatcatgctcgacattgccggcaatttgcacgagggcgtttgtgtcctttggaaaacaagagccgccgtagcctatgcccgcttttaaaaactggctcccgatccgcttatcctgtcccatcccgtatgcgactgcttcaatatcggcgccgaccttttcacatatattcgaaatttcgtttataaaactgatcttagtggccagaaaagcatttgaggcatatttgatcatctcggcgcttctgatatccgtttggtatatcgggatttgaaacggacggaagagctcctccagcgtatttgctgttttctcatcggccgtcccgatcacgatcctgtcaccatgaaaggtatcatagatcgccgacccctcacgcaaaaattccggattggatgcaaccgaaatactgacaggctccgctagatgttcagtgatcagtccattaatcaaatcgtttgtcccaacgggcactgtgcttttcgttaccacgactgtatctcgtttgacatgctttgcgatgcgtttggccgcatctgtaatttgctccagattggcgtgcccgtcgcttttctgcggtgtgccgaccgctataaaaatgatgtctgcctgtgccaagcctttctcatagctcgtttcaaagttcagccgtccatcagctgtattttttctcatcagctcttcaagacctggttcaaatatgggggaaatgccctttctcatttcatcaatcttgtgagcgtcaatatcaatgcaggttacatgatgtccaatctcagaaagagaaacacctgtcacaagaccgacatagcctgttccgatgactgttatattcattgtttccctccaacagttaaattgctgctttgcagcttccgtaatatcgtatgagaacatcctatcatgaatgcgaatgatctcccgcatagcctgtcgggtacagcctgtacagatttctgaaatgtgattcaatcatacaatacactattatatcgctctcaaaaagaaagtggtgaaatgagaatcggctgttaaaaaagaccaaacaattttcttcttttgaccggttgcggaggctgtctgaagatggtctgattccgcaggagaagctctgcattttccgtcagcatataaggaagttccgagccgaattctttctctagaacataaagggcctcttgagtgtgaaaatttctcgttttcacattatgggcatctgaggctacgaaatggatcaaattggcttcaaccagccggagagaaaatgctttcagctgcttgccgaaggtccccgcaagacttcctgaagtaatctgagatgctgctcctttttccacaagatgatacagcaaggacgggttttcgcgaatttccctgttgcgttcaggatgggcgataaccggaatatatcctttcagctgcaaatcataaaaaagctgctccgcatatcggggaacgtgatcaaacggaaactcaatcaagatgtgttttgtatcattcagcgaaagcagctgctgtttggcaaggtcttgttccacctcgccgtagattctgatttcctgtcccggaagcacatgtaaaggaatgtcttctttgattaaacgtttgtttaactgatctgctgcttctctgactgcagctggctcgtttttatacacaccgttgttatgatgaggtgtcgcaatgatcgtccggattccctgacgaacagcggctcttgccatttctatgctgtcggccgaatcacctgccccgtcatccattgcgggaagaatgtgacagtgaatatcgatcatgtcctagcccccttttttcgcaaaaataaataacgggcacgatgcacgttatttattttgcatgaaattgtccttgtttccgtaatatccgtattcagagtgcttcgaaagctttttgccgttcataatcgccccaagaagcttgcttttgcacgtttcaagcgcctctttcgcttttgcggcttgttctttttctgttttcccgcttgaaataaccagaacagaaccgtctgccacgttgcctaaaatctgtgcatctgctacggcaagaataggcggcgtatcaaaaatgaccatatcatatgccgcacacgcttcgtatgcaagctccttcatccacttcgaggagagaagctcggccgggtttggcgggatcgggccgctcgtcagcacgtcaagatgtttttcattcgatgcctgtacagcctgctccatagagcttttctttaataaaacagatgttaagccaaccgtattttcaagaaaaaaggccgtatgtactgttggttttcgcaaatcagcatcaatcaggagcactttttttccctgctgggcgaatacgacagccaggttggcggccgttgttgattttccttctccgggacaagccgatgtgatcatcactgatttcatctggcggtccactgaagcaaattctatattcgtgcgaatcgtccgatattgttcagagttcaaggatttcggctctgtcattgcaatgacatttctccgcatccgcgagtctctgctttttctaagcgccaaaatgtccactccccgttttttcagattggaaaccctgtaaggtctttgctgttttctgctcattcgcaatggtggaaactgtccctaaaacaggtatgtccagcaaggattcgagctgctcttccgatttgatcgtattatccaaatgctcgagcaggaaggccagtccgatgcttcccgccaatccggctgcaaacgcgatggcaatgtttagtagcggctttggcgatacaggggacggatgttctgaaacctcggcttttgacagaatgctgacattgtcaacattcataatggatgtgattttgtcttgaaaaacagatgctatagtattggcaatatgagccgctgtttccgcgttttcatccctgactgatatgttgaccacttgggagtcctgttcgctggatacggtaattttgtcattcagttcttgggatgtcatcgacaggcccatttctttaatgacttcatctaagatggcaggacttttaatgatgacattgtacgtattgattaactgaagattggtttggacatcgttaaattgaacttcttttcgttcatttttcgattggttgaccagaatctgagttgaattttcatagatgggtgtaagtgcgaagaaactaatgagtccgccggcagcagtggcagctgcggttacaatcataatcaaaagtatgcgttttgttaacgttgataatatctcttttaagcttgtagattctcccatgatacctccaaatctcttataacatccttttccatctacgattatacaacgttgaaaccgcatttctccagcttttcacgtgacataattcgacatttttttacaaaacgaaatgttactcttttttatgtaagcgctatatttactgtgttgacagcgctgtctcattttctcttattcgtgcagtcacgtaacctcgcataaaaaaatcccgcaaaaggcgtgcgggatttttatgttgcatatccatttttaatatgagaaatcaaattttcaagcatttccttcgtcgtcatctcagatgactgctcaccaatttcatgtgcatgcatcaaaattttcagaaattcttcttgattcaatttcttttcactcatcttttttttcctttcagcttccattaagttgaaaacacgattattatatgatgctggttatcaatttgcaatctctaatacatcattcgacacatcccattttttatgtccttttttaggaaaaactttttaaggccgatgtgttgcgatataatagagaaattggatctttttattacgtgactcggttaggagcgataatcatgcttcagaatatgatttccaaagacgatgtgctggcatctgctgaacagttaaaagaacttcttccttacaatgaggaaaatgttcagctgatcaaaaaagcccttattttatatcggcaggattcagtctatcgtttacaagcagtgagtccgacggaagttacggcttacgtgcaggatgttgtgcctgtgcgggtcacattgaacttgtttgtcatagtcaaaagcggctgttcatgtccgtccggaagaatctgccgccatatgctggctgtgtttttatatgtatatgcaatgttcgagcgagtgggtacttttacagagcattggctggagagggaaaagcttgaggaaagcaaagagctcgtccgccgccagtttcaggaaaaggtgctgcctaatgaagaatcgctttcaagctggcttgctttttttgattcagagttttctctctggcaggcacgtacgccagaaggcagccaaaacatgcagggcctctattacggctacctgtccgcattaaaaaaacatgcgccgaacaagccggagctgaaaagcctgtatcagattcattccgcgattgcggtttggcttcgcatgttcacattgattgaagcgggcaagctgaaccccgaacaagatttttattccctcaatccgtacgttgaacagctgatggatacaatctacagctctattgacaaattaaaaacgtacgcgctgtcttttgcgcttgatccgtttttggataaaacaccggatgttatccgacctttgctgttgaaagaagaaattttccaatatgaacgcatccgcgtcttcggtgaaatttggagtgcgctgttgtcgcggccaaaatgggtggcacgcgaacaggagatattgaaaaaagaagctggacggcgtttttctcccgaattgcaattcgggcgcctgcatttggaattcctgcaaaagaatgatgacgttatttttgcggaagcggatcaattcccgccggaagcgctcccttatacgttccaatggctgagtgaaatgactgccaagaaggactggaaacggcttaaaacatggtaccagcaaattgagccaattgcgatgggttatacgaagctggataagccgtttaaagagattcgcgatgtgatcggcgagctgttccttctgttgaatgcctatgtgcagcaaaccaatgatcaagcgctgtttgagcgctttgccgcgggctgtctgccgtatacgttcacagaatacagccatcatttatatgaaaaaaaacgctatgccgagtggattgaaattcatagccttgtcggcttttccatcaatgaaatggataaaatgatgctcaaggaaattgcagcgagcgaccctgaggcgcttataccggcttaccatagagaagtggcttttttcattgatcagaagaaccgcagctcgtacaaggaagccgcccggtatttgaaaaaattgcgcaccctgtacaaaaaagcgaaaaagcagaaggtgtgggagcggtatattcagctgctgagctcgcattacaagcgcctgcgtgcgcttcaagaagaactgcagaaaggaaagttgattgatggcgagtcttaaagaaattctcatccacgtcgaacaaatggaagatgggtcatttacgctctcagcctttgatgaaaatgagcagcctcttccctacagccatatgaaaaagcatttgttccaatggcatgaatcctcattttacggaacctttctagaggatgtcagcttcatcgggacgactgctgtcctgctatcgccatggatgactgtagagcttctcggcaaaaactcgttcaactcattcagctccgtgcagcttacagaagaaacggagccgctgatcgaggcggcatcgaccatctatgaatttatcgcggacggcgattttctgcctgactatgacgcatggacaaacggtgtttttcgctggaaagaccgcgataatatactggaaggctttactgcggaatggttttccgctgccgtacaggattacatccagtacgacgatgacctgcgggagaaatgggaacatatcaaggaaaaatcgcctgcggttacgacattccgcggccattttcttgatgaagaggattttctggaaggcattggctggattgacgatcaatctccatttactgtcggcttgcgcttaaatgaaccggactttgacggagacgaatggaagatcgagatgtttttacgcgataaaaagagcggcgctgtagaattctttgacggactgaagagcctcaaaaaatcgtggcaggcgtacagcgataaaatcgcgcgtgagcaggaccgctttcacagaacggttccgtggctgtcgtttgattccgggacaacgctgatctcggaggaagaagcctggatcttcctgtcagaagcaagtgagacgcttgtcgatatgggggtagaaatcctcctgccgtcctggtggcagattgtcagagacagcaacatgatgctgaaagcaaaggtgtcgtcctccccgcgcggcgagtcatttgtcggcatgaatgcactgcttgatttcaactggcggttcgcgacaaatggaattgaactgactgaggctgaatttaatgagcttgtcgccagcaacaggcgccttgttaatatccgcgggcaatgggttaaaatcgatccgcagtttatcaaacagatgaaacgcctgatggaaaaagcagaatcagagggactccacatgtctgatattctggcgcgcgagctaatggatcagcaggatggcggacttgaggattcggacctgattgatacatctgcttttgccggcattcagtttgatctgtctaaacagctcaggtcactgattcgaaagctcactgccgcggaaaacctgccggagcacgaagtcagtccttctttcaaaggaacgctccgcccttatcagaaatacggcatgaactggctgctgtttctgcgggaaagcggttttggcgcctgtctagctgacgatatggggcttgggaaaacgattcaaatgatcgcctatttccttcacgtgaaggaaagcggccggcaaaaaacgcctcatttgattattgcgccgacatccgtacttggcaactggcagcgggagcttcaaacctttgcccctgatctgtctgtcgcgctccattatgggccgcgccggccaaagggtgatgatttcgccgcgcattatgaaaacgcagacgtggtgctcacttcatacggtctgtcacatgccgatactgaagagctttcttctgtgacatggaacacgatctgccttgatgaagcgcaaaatattaaaaacgcgcatacgaagcaatcacgcgcaatcaggaagctgaagggtcttcatcatatcgcgctgagcggcacgccgatggaaaaccgcctgactgagctgtggtccatttttgacttcatgaataaaggctacctcggcagtttgaccggcttccataaacgctatgtgctgccgatcgaaaaagaccgggacgaaaagagaatcggacagcttcagcaattaatccggccattccttctccgccggacgaaacgggatgaagaggtcgcgcttaatcttcctgagaagctggaagaaaaagaatttatcccgctgtcagccgagcaggcatccctttatgagcagctcgtcaaagacacttttgaccatatgacgtccctgaccggcatgcagcgaaaagcgctgatcctcagcatgcttggacggctcaagcaaatatgcgatcatcccgcgctttacttaaaggaagagcaaaccgagctgctggccggcagatcagtcaagctcgaaaaattgctggaactgatgacagcgatccgcgcccaaaacgaaagctgcctgattttcacgcaatacattcagatggggaacatgatgaagcggctgcttgaaaaaacgttcggggaacctgtgcaatttttaaatgggagtctctccaagcaagagcgggatacactcgttgagaaatttcaaaggaaagaatatccgacactgattctctcactcaaagctggaggcaccggacttaatttgaccgccgccaatcacgtcatccattatgacagatggtggaacccggcggttgaaaatcaagcgactgaccgtgcataccgcataggccaggagcgctttgtccacgttcataaaatgattacgacgggaacaatcgaagaaaaaattgatgtcatgcttgaatccaagcaaaccctgaacgatcaaattatccaaagtgaaaactggattaccgagctttccacacaggagcttgaagaactgtttacattaagcgctacagcgcaatgatcatgactaaaaaagctggctctgatagagccagcttttttccgttcatagccgtcacgccgaatctccaaaaaatccgttacgccggttatatcaacaggatgcgcttttggagcagcacatatacctacagcaaatgtttcatcatatgtgcgacaccatgttcgtcattggttaaggtgacagcatcggctatcgatttgatgtcttcccgggcattgcccatcgctacaccttttcccgcagcctccagcatcgatttgtcatttaaactgtcacctacagcagcggtttcctcgagcggaatattcagctgttttgcaagcctcttcagcgcctgccccttggaagctttgcgggaagaaagctcaaagttgtgctcagccgaactgacaagcgtcaaatcttcggcatgctcatatcttttccagcctgcctcaagcttttctttgaagaaagaaaagccgagaatattgtaaaaatcgattggctgatcggcttcaaacagctcttgaaaagagttaatgtaagcaaagcccgattggctgtattgcacctcggccgcctgcttaaggacagaaagatccgcttccgggtttgcgcttctgaatctgtccagctcaacatcaagaagttctctgccgttttgcggtgtataaatcgctgaacctgtgaatacctcataataatagttttccgactcaagccatgagagaatatcatacgcccgtttcttatcaatcgtttcgtgatgataaagcctgccgtcgggatcgtgaatgacggcgccgtttgcactgatgacccatgttttgatccccagcggttcaaagattgacatgacgtcaaaatgagcgcgcccagttgacaccaccacttcaatgccatcccgctgcgcctgccgcagtgcgttttcattttccaagcttacctgatgcttgctgttgagtaaggttccatctaaatcaatcgcaattaatttcacgtttgtcagtcctttccttcatcctgctctgtcacgagaagctcaacgccgtttcggtcaagcaagtcacaaaatgcctgattcggcagcctgtctgtaatcaaaaggtcgatttcattcagctccgcatactgataaaaactggtgctgcccagcttcgaatgatctgcaagcgcgatgacctgctttgcctgctgtatcattttccgcttcaccatgccatcctcttcatgcgcaattgtaatgccatgttcggaaataccgaccacaccaatcagcgctttatcaacatggtagcttgagagcttttcaatcacagaggacccgtacagaaagcggtgctccttttccagcttgcctcccagcagataaatttcaattccctctttatcggacagcacatccgcaagattaatcgaattggtgattaccgtacaatcaaccgcattcaaatgctttgcacatgcttgaacagttgtagaggcgtctaaaatcacccggtcaccatcatgaataagcgatgctgcaagcctgccgatcttatttttttcctcagacactgttttcaggcggccggaatagctttgaattttctgatgcacagtcggcaaaatggcgccgcctcttgtgcggatgatggcattctgttcctcaagtttcacaagatctcgtcgcgctgtatcccttgacacttgcaggagcgtacagatctgttccgttgtaattcggttatgctgttttaaaaaatccaaaatcgctactaatctttcttcttggtacacgccctcattccttttctcagcaatcatttataagtaattataagtttttatttaattctattcaacattaataagtgattttaagtaaaaatacgtcgagagaaccaatttttcctaagtggacaaaaagaaagaaccagtctggtcgactggtcaattttgaggggatgatgcgaagattcggataatggtgaatggatagataacgggaggagcaaggggtgtcaatcagcagctttttcccggggtttagggtccataaaacgaacagtgtcagccaacacttctgttacatacacgttaacgccttccgcgttttcatagcttcttgtctgaatccgtccgcttactccgacgagagaacctttttggcaatacaacgccgtgttttcagctgtttttctccaaagtgtgcaattgacgtaatcagcttcgatttcacctgaagcattcttgaaactgcggttcaccgcgagcgtaacatgtgcaactgccgcaccggcggaagtgtagcgaagatcaggatcttttgtaagacgtccgacaagcatgacctgattgaacatgcgattcctcctctccttgcggttgtatgtattgtaaatgatgcaacaagaaaagaaaaacgcttaaaaatggctttcagcctctgtttttatctttcgttttcatttttccttcagctaaaaacatcttttgctttttccctttgaagaaatatgtactttttaaaaaacggaaaaagatttgctttgtcagccagttttgcgtattcatgcgcacataggaagagccatcccacgcaaaccactgaaagctcaattttttttccggcattgacagcttgattttatactgctccatgccatcttgtgtttcgtataaaaaacttattcttccttttttgttcagatgaacctcaaacacttctttacggcttaacatatatgttacttccttttgaatcaaatggctttcagaaggagcgccgtcaatataaatttcttttaaacgaaattgattcataccacatctctccgtaatccatagtcagttacagtataatgaaaaaatagaaattattaaatgtttcgctcatacaaaattctttagccccagcattgcaggattttttcctcgaaaacgtttatgttataatggaaggcaagaaaactttggaagtaatcggggtgagaagaaatgaaaacctttaaactggttgacctgaatgtggaacgagtggacaaggaagaacaatcaatcgaacagtttccccttattgacggactgattataaataaagaagacggtgaaaatcactggctgattgaggcgcttgtacagaaagaacatctgtctttttttgaacagcttcaaaacagccaatctgaagccaaagtatttgtaacgatcacgaaaaaaagcaatcgccccgcccagctgacagcagcagtgaaaaatatcgtcaagctggaagaaagcatccaggttttactctatggacaaatggtaacaagaaaacagcagggcactgaaaccattctcgagtcccttgtaaaagagggctatacaggaacaaaactcattgaggcatttaaacaaaagttataaatatgagggggcatgttccccaaaacagacacagaaccgaagagcatcacaatagacatttagaatagatatgttctgcatgaaaaaagctgccgttttgaacggcagcttttctcttcgtgctttcactcttgcatatttaatttgtatggccaaaagaatcaaccaattcccctttcacaacaaggcgcccttcagttttgacagccttgtcacatgtgattagcgtaatctcttttttgtttgtctcctcaactacatctgcatccgtttccgatatgatgtctttagatgttacagaatagatataatcctttttaaaatccgtgatgacaatttgggcacctgtttttatattctccagaggtccgaacagaagattcttttgcttcaaatgatggcccgccaacggataatttccctcacccattttttgatccgggcgcattgttgccgcccctatcaaaagattttcattggttgtgccttttacgatcggaagctccagatcgacacttttaattgttatctgccgccttgattgtgaagtaaaaataagtatatttcacgtgctttcgacgttctccacttgactggaatgctttaatggcgatcccggcatctgtagcttcaggctttccttcagaggaatcagaaatctcaaactctattttctcagtgttcagcacataaccggctggcgctttcgtttcaacaaaagcgtattgtcccggtgcaaggcctgaagctgtgactttatgatgccggatatgactggtttcgaagtctgtatgaaaattcgcgaacgattcagcatggtggatcttccggttctgatcattacagctgccattatcggccatgacaaatacaaggcttttcatgccggagcgaatgacattttgcaaaaaccttatcattactctgaatttatggcgcgtattcaaaacctgatcatgatgaaacatacagcaaatcaagccacaagaatggaaatggcgtttctccagtcgcaaatcaagcctcattttctttataatgtattaaacacgattatttctctcactcatttggatattgaaaaggcccgggaggtaacagaggaatttaccaactatttaagaatgagttttgactttcaaaatacatcagccatcagttccttcagacatgagctttcgattatcaattcctatctttctatagaaaagacgcgattcggtaatcggcttgaggttcttttcgatatagatgaagacattgactttatccttccgcctttaatgattcagcccttggtggaaaatgccgttcttcacggtgtcagcaagaaaagaggcggaggatggatcaaactgacagctaaaaaacaaagcaaaaatgagtatcacatcaaagtagaggataacggtgcggggatgcctccggaaaaacaaaaagatctcttatctgcggatttcgatcgcagcgtcgggttgaaaaatatcaatcagcggctgaaacatttttgcggaagcgagttgatgatcatcagcactccggatgcaggcacctctgtctcaatgctcattcatctcgctgaaacaacagaaagccccgcgggactgaaggacatagaacgaacctaaacgaaaattgagataaaaaaaagacgccgtttataacggcatcttttttattccggcgactttgcttgctgcttcagcaggtctctgatttctttcagcagctcctcctgcgcatccaccgcttcctccgcagcctcttcttctgctgcttcttttttgcgccttaacccattcaaagtccgaatgacgataaaaatggagaacgatataattaagaagttcacaatcgtctgtataaagctgccatacttcactacagcatcgccaaacgtaaacgacaggcctgaaaagtcaagccctcccagcagcaaaccgaccaaaggcataatgatatcatttactagagatgtgacgatctttccgaaagcgccgcctatcacaacaccaatcgcaaggtctacgatattcccccgcatggcaaaggctttaaattcattccacatacaatcacctgcttttctatatttgtaaagaaaaaaagacaaatgtgccgctggccatctgccttttttcaattattctccgagggcaaaagtcagttctacttcgcaaacgacttcgccatcaactgtggcaacgccttttccgcgcccgattgtgccgcgggcacgaatgatttcaacctcaaggtgaagctggtcaccaggcttgacttgttttttaaagcggcagttatcaatgcctgcaaaaaaagccagtctgccgcggttttcttctttaatcaacatcgcaacagctccgacttgagcgagtgcttctacgattaatacgccgggcataaccgggtactgaggaaaatgtccgttaaagaactcttcattagcggttacatttttatagccttttgcccgtttgccctcttcaacttccgtaatccgatccacaagcaaaaacggataacggtgaggaataatttctttaatttgctgagtatcaagcattgtcttgacatctccttcatctgcattagtatgtatagcaatcatcaaagatccaatctgtacatttgaaaagtatattatgaattaatctctttttcaaccgcgctaaaatgtaaccaactgtcaatgagagccgtcaaaagttatgatatgataattatagattttaccaatagcaaagaggtaggaaaatgatttcgaagtttattgaaaaaagaatgctaaacatgttagacgagtggtattccgcaatgagcaaacgcaaaatgaatcacgtttgcacactgaaagagaaaattgaccagcaccttccaaagatcaaaaagaacacaaaactttggatgcgttatcaattgtttcaggcccgccatcagctgctttttgaaaaccagaacggactcgattcattgttcgatgacctatatggcctggaagacaaaatggatgatgaattgaaatattatctgtattttttctctgggttatatgagatggtaaaaacagctccgaaacatgcagtacatcattttaaaaaagctgaacagtacctggccgccattcaaaatacgtttgaagccgctgatttatattatcaaaccgccggcgcctattacttgatgaaatcaccgccgctttccatccaatacgtcaaaaaagcattacacatctatttgcaccaattcggctatatcaaaaaggtaatcacctgtaaacttttgctcgccgtgaattatattgatcaagaacgctatgaaaaagctgaacagcttttcaaagaaatcattaagaaaacccagcaactacatgacgaaaacctgctatgccacgcttattataaccttggctttttaaaagcgaccgagaaaaaagaccaggaagcgcttctttactttagaaaagtattaaagaatcaagaatttgaaatgaattcaccagtctcatatcttcattgtgtgtacgagtctgtcagagcgctttttaaaacaggaaacatcacagaagctaaagccgtccttcaaaaaggaaaagaattatctgaaaaggtagacattcaaaccatttatttaaaattaaaaacgcttgaagccctctacacctcagtggaagatccctatgagcagctgctcgaatatgtgcttgaattagaaaaaatcgaggcgtgggtggatttagaagtgctgttagaagatattacggaatactacaaaaaaaaggacgatttcgaaaaagccgctttttttatcatgcgcggctgattgaaaaacgcccattttcttattatctgactgaattgattaaaccgagcatttgatctcccattgtgatcgttctgctgttcagctgatatgaacgctgggacgtgatcaaatctgtcatttgttctgaaatatcgacattggacatctcaagtgagccctgctgcatgccgatgttttgtctattagcgccgtttagctcttcaaaagctgccgcattatcaatagagaaaaggttattcccttcggatttcagctcttgagggttattcacttggacaacgccaagattaaaccgctgaaccgcgtttccgtcagatgcggttaaggtgccgttcttattgatggtgatattcttcattgagctgtcgatgttcactgtattgccgttctcatcaagtacgggatacccatttccagtgacgagctgcagctggttggcattcgcagcggacggcgttacatacagcgccccgtccctcgtatactggcggtttccatttacatttacctgaagatactggtatggagacgtaaatgcgatatccagatcgcgatcggtcttctgaatgcttccttgatcagagaccaggcgtgaattcatcatcgctccgacgccaaggcgtaagccgggcggcgttttgcgggcttttgccacttcctcgtttttttcatcaacctgatcgaattgctgtctgacaagctcagaaaaattcgtatcttttgccttatagccggttgtgttgctgtttgaaaggttgctgctgattgtgtcaatctgctgctgcagctggtttaaggttgttgatgccgttagcattgacctgagcatagttgatgtcccccgttttttcttccgttatcttaaatttttccaatttcatttgctgctttatccatacttttatcgtaagcctgaataaccttctgattcgcctcaaacgatctgtacgcttcagtcatttctgtataggcgcttgtcacatccacgtttgaaagctctgagacgccttgttttaatgaataggatacctgattgtttccggctgcgcttggcagatcattaccgtccgccgtgctgtacaaatcatttccgtcccgtttgagagtgcggacatcttccgccattctgacatcaatctggccggctgtgcgtccgttcgttgtcacagtaccgttttcagacacagtaaaattctcattatcaacagtgattggctggcgatccgtcgataaaatagggcgtccgttgatcgtcagctggttgttctcatttagtgaaaatgtgctgctttttgaataacggattccatccgctgtttgaaccggataaaaaagagcagctttttcattggtttccgcattcatcggaacttgattttcgatcaatgcaatgtctgtaggctgatctgtggacttcaggcttccctgtgtgaagagaggcttgagctcctgcatatacactccggtattcacggaaccgatttccgtcctcgatgtcccggccggagattttgattctattctgctgagcagcatttcagggaacgcgcgcatcgagccttgatcagctttatatcctgatgtatttgcgttagcaatattatttgaaagcatttccgttcttcgctgctgggcaatcattgcggatgttgctgtatataatccttttaacaaatttcccacctctaaaaatggcattttttccagttgtcatataggaacgttcgttctataataaaaactcagtattttatcctattatcgtcatttaacatcttttcgtgaaggctttttcataaaaaaacctcattctttttcagaatgaggtttgtgaaatcagcttagtttgcgtttaggaagcttgtccatattatcaagcatgacacctgtgccgatggctacgcaatccataggattttcagcaacgaggaccggtaccttcagctcttcagcaagcagctggtcaaggccgtttaagagcgcgcctccgccggtaataataacgccgcggtcaataatatcagcagaaagttcaggcggtgttctttcgagcacttgttttgcagcctgaacaataacagcgacagattcacgaagggcttcttcaacttctttactgtttactgtaattgttcttggaagaccggaaaccatgtcccgtccgcgaatggaaatttcctcgtgacgtgcgtctgggaaaacagttgcgactttaatcttaatatcctccgcagtacgttcgccgatcagcagcttgtactcgcgtttgatataatttaagatttccatgtcaaacttgtccccagccattttaatagaagaggaggtgacaatatcgcccattgaaataaccgcgatatccgtcgtcccgcctccgatgtctacaaccatgttaccgcttggctggaatatttccatacccgcgccgatagcggcaactttaggttcttcttcaaggtacacatgtttcccgccgcttttttctgcagcttctttaattgctttttgctcaacggatgtaatattcgtcgggcagcaaatgagcatgcgcggctttgagaacaggccttttacattcagcttgttaataaaatgtttcagcattgcttctgttacttcaaagtcagcaataactccgtctttcagcgggcgaatcgcaacaatattcccaggtgtacgtccaaccattcgtcttgcctcttcgccaaccgccagcactttgccgctgtttttatcaagtgcaacaacggaaggttcattcagaacaattcctttacctttaacatggatcagtacatttgcagtaccgaggtcaataccaatatcccttgcaaacatctatttatatcctccttgaaaatctgtttcacagtaaatatccacattgtgccctaattatatatattatcataaaatatagaaaaaaagttggaagcacaataagttctttacaaatttttgcggatgttttatgaacgatttcaagaaggcaatgccaggtgattacgattgctgaacaggctctccttcgagaatttcatcttttttatatttgagctttgtcgcttctcctcctcttaaatgcctgatggatttatgataatcgagtatttctttcacttcgtttgccaagtcggggttaatttcaggcagacgctctgttaaatccttgtgtactgtacttttggaaacaccaaattccttcgcaatgacacgaacggttttctttgtctccacgatgtacttccctatcttgattgttcgctctttgatgtaatcgtgcacaccactcgacctccctaaaatggatgtgagaagtgtgaaatgagatccgtattctgtaaagagtcgttcattatgccgcttcttcgttgtatggttttaaaagtaagtttgtgaaatatgcccacgatccctcacctcaaacactctctttgttaggtttgtaacagtgtattagcattcttttgggaatatgctaaaaactcaataaggacaaggggtgaaacgaactttttcagattcagcaaactatttcgcgtcactaaattttcatctttacaactattgatcgctcctgtaaaatgaaataagcaattagttacttaggtaagttttttagaaggagaccgacatgtcctacgtcaacagacacctcattcatcaaatcaaccaaagcgcccgcctgattgccaagaaagccaatgaacagctagagccattcggcctttattcatctcaatggtcagttttatattgtttgcgtacgatcggaccaatgactcaaaaagagatttggtcctatttaaatgtggaagcgccgactgtgactcggacgatcaaacgcctggaggagaacggctgggttcagagacggcaaggtgaagacaaacgggaaaaacttgttgtcctcacaaaagaagccgagaaaaaatacgaagaaatcaatgtgaaaatgttgaaattcgaggaagagctgcttgcagatttccgggatgaagataaagaagctttttctcatttattccgcatgtttttacaacaatgaaaataaggaagtgacatacacttgaaaaaagcggatgcgatatggaccaaggattttattatggtcctgcttgtcaatttatttgtgtttgtgttcttttatacatttttaactgtattgccgatctatacactgcaagagcttggcggcacagaatcacaaggcgggcttttaatcagcctgttccttctgtctgcgatcattacacggcctttctccggagccatcgttgagcgtttcgggaagaaaagaatggcgattgtatcaatggcgctcttcgccctatcatcttttctgtatatgccgattcataacttttccctgctgctcggattgcggttcttccaaggaatttggttcagcattttaacgactgttacaggtgcaattgccgctgatattattccagccaaacggcgcggtgaagggcttggatactttgccatgtctatgaacctcgcaatggcgatcggacctttccttggtctgaatttgatgagagtggtaagctttcctgtattctttacagcctttgcgctgtttatggttgcgggcttacttgtttcgttcttgataaaagtgccgcaaagtaaggacagcggtacgactgtattccgttttgcgttctcggatatgtttgaaaagggcgcactcaaaattgcgacggtcggtttgtttatttctttctgttattcaacagtcacatcatatctgtctgtattcgccaaatcagttgacctttcggatatcagcggatatttctttgtttgttttgcggtgacaatgatgattgcacgcccgttcacagggaaattgttcgacaaagtcggaccgggcattgtcatttatccatcaatcctgtttttctctgtcggactctgcatgctgtccttcacacatagcggcttaatgcttctgctttcaggggcggttatcggtcttggctacggatcaatcgttccttgcatgcaaacattggcgattcagaaatctccggctcaccgctccggttttgcgacggcaacgttctttaccttctttgacagcggaattgctgtaggatcgtatgtattcggattgtttgtagcatctgccggcttctctgccatttatttaacagcggggctgttcgttttaattgctctgcttctctacacgtggagccagaaaaaacctgcagaggctgaaggaaaagtgtctattgcagaataacttgtcagactgccgggaaatcccggcagtcttttttccattaaaacacggcgccctctcggttgaacgagagaacgccgcttatagcaattattcaatgacaggccgcgcaggtgaatcaggatctaacgaaaaatcataggacgcttcatcacgaaacatcggatcggcatatatggattgttgatcgttttttgttgcttttcgatacgaagaaaatgaatcatattctttctttttccacatccatatgccgtcttgatccgcttccttgtggtacacgttatgattgaccgtattaccttcgttttctgtaaagtcgtttccgataaataatctggaatcaccggccgtcaatatattcttttcaattgtgttgtttttcgtatcgtactgcagcagcagctgtccgccgtacagtccctttgtgtcattccggtacataatattgcgggcaatcagagaattgctggtgccgccccgctttttgtcatatcctccgattgaaataccggtgtacgcattgttgtacactttgttgtctgtgatctgaatggcatttgcatactttcctttgtgttcagacgttgcttcaatcccaatatcgttatcgtaaactgtgttgttcttaatttcgatatcgtgtcctccatcgacataaatcccgcccgctgagtattcatctccataagcaggattgccgtaagtcgagttttgataaactgtattgttttctacgactccgtttcgcacgtaatcgtttttatccgcggttccctcataaccaattagatcaatcccgatgttattattgttgcggaccacattgcctgcaactgtgaagccgtcgatattaccgttcagcacaactgcttcactcgctccaagcgtcagtttctcaactgtattgtcctcgattcggatgtctttcatgctgccagtcccataaactgcgattccgtgagcatttccttcatccgctgttgtcttaatcccccggatgtgattatccttaatggcgatatgactgctggaccctgatacataaatccctatagcagttgcttcctcagatgaaacagaaagatcttgaattgttaaaccgctgatggcaatgtcatgtttatcgtgaatacgaataagcggtgtttcatattcagcgttcgcaacggattcaccgctaatcacgacgttttcattttcatagtttcggaatgtgataggctttccgtccgtaccgctgtgctttacatcaagggtctcatgatacgtgccctcccgaatcatgacagttgtgccggcagcagccttctcagatgcgtgtgccaatgtacgaaacggcttttcttttgttccttcattttgatcactgccatttggcgaaacatacagataatccccagatccttcctcattcgcttttgtcttatcataaacgaaagcgaggatgacagacgttaaaacacccgccaaaagaataaaataccattttctcattttcgattcccatttcgttttagaatagatttctaaaaccattataaatgttctatttatggaaaaccatttcaaaaatatgaaaatataccgtctaaatagatcttattcagcctggcggacctgcgcatgttcaactgtttcaattgccaatgatgcaggcgggtgaacacgcatcagaacaatgtagaaaagaaaggaaatcagcacacctacaaaccaagaaatatcgtataagctcttcaatacaggaacatacatgccaatcagcgaaatcagcgctcctaacattgtggctgcaaacgcacggtaattgtagcccttccaatacacataccgtcctgtttcggaatacaggtcatctaccgagagctcacgtttgcgaatgataaaatagtcggccatcatcacgcctgccaccggtccaagcatgccgcctattaagccaagaaacgcatacacgcttgtcgcgctctccatcagcttccacggaaccgtaaataaagcgagcaacgctgtgataaagctgccacgtttgaaattgatatatttcggcagggcattcgctatatcataagcgggtgatacgatattcgccgcgacatttacagagatcgtggcgatgcagagtgtgatcacggacaagacgatgacataagggttatcaaaccgcgccaaaatatcgacaacatcccaaatcggctctccgaacgcgacctgcgagccggaggtcaccgtaatacttgcgaatgcgaacagcgcaaacgttcccggcaaaccgtaaaattgtcctttgatttgctctttttgtgtttcagcaaaccgtgtaaaatcaggtatatttaagatcaatgtcgcccagatgccgatgatgccagtaactccggcagcaaacggccagaatgtttctgaaaacgtatgaaactttcctggttgagagtatatcgggcccaatcctccagcaatatcaacggcccaccataccatgccgccaaataccagatacactaaaggccctgcccacacctcaaaacgtttaatcgactccatgccgtgatgcaatacgagtaaatgaatggcccaaaagaatacaaaggaaagcaaaccggacaagtgaatgccgagaatgttccactcgccgccaatttctccccaacctggccacatattcaaaagcaaaatgttcagtgccgtgctacccgcaaaggtctggatgccaagccacatgatagctgtaaacgcccttagaagcgcggggatattcgcgccgtatatcccgtaagaagcccgaatgatcactggaaacggcagcccgtattttgtccccgcatggccgtttaaggcaagagcgccaaataggataagtgatgccgtaataatgatcgccagcacctgccaaggcgaaaggccgatcgcaattaatcctcccacggtcgcgtaggtcggtatgttatgtatacatcccatccaaatggaggcaaagttcattgctttccacgtccgtttttcctgtcccaaaggcaccagatcttcattgctcagcctgttggattgctgctgactctcttttaatttcatagccggctcccctttccatattgtctatatgtcgtcacacgttatgttttttgacattagatgtcacttaatataactgaagagtcagacaataacactggctatgatatacaattttcccgtttgtatttgaacaacttaaacaagaaaaagagacagacctcagagcccgtctctttcttaagatgcagttttcattaatgcagcaaatctcacagccattaacaggcttgctccgcccgctataatcataatgattcccatcatatcaaaatgggctgccgtgatttctttaccaaaaagaatgccaaggatcaccgaagacaaaatcgatcctaggtaacggcaggtttgaaacaggcctgaagtcgttcctaccatgttggaaggactcgtttccagcatcgctgcctgaagcgcgacattgcccagtccgtagcctatacccaagagcgacagaatgaggcctttaccgatggtctggacattgataaaaaagatggttaagagcacggctccagccgtcatcaaaagcgctcccgcaaagatcggcttgacgacaccagatcggtcgatccatttgccggttagaggtgacacaacgatgctcattccagacataaacagcataaacaggccgctcgtttgaacagaaagatgcatttcatcctgaaagtaacttggcaaaccaaaaaataaacaatagaagaaaacattcaataaaataaactgaacatacacggctgacaggtttcgctgtgttttaaacagacggacatcaataaacggcttatccgttttcagctcgcgccagacaaacgcacagagcagaagcaagccaagcacaccttcaaccgcatgcggcgacgtgctgaacgacagcaaaaaggatagaaggaaaatgattcccccggcaaataaaacaattccaagaatatcgagctgccgaataatggttttgattcctgccccttttttctgatctttcgggaacatatacaggcccaataagaagctgaggataataaacggcaaattaacgataaagatcgccggccagcctccccatacaatcaaaaacccgccgactgtcggccccagcgccgtcatggcggacgcaaaaatagagagtacagccaaggctgaagcttggcgctcatgaatatgattccgaatcaagccgacacctgacggataaatcgcactgctccccaccgattgaaacagccgcatgaccaataatgtcataaacgtcggcgcaaacggcgccccgatggcagaaaccgcaacaagaataagcccgaataaaaacaagcgtttccgcccaatcaaatcaccgagctttcccgttacgggctgcgctacggcactcgccaagtaaaacgaggaaatcagccaggaaaccgttgtaaacgagaggtgaaactcatgctggatgctatggagcgcaagagagatcatagacgagttcagcggattcagcattgttcccgaagccacagctgttaaaaaaacagctcggctttttttcgataacatcatttcacttgttccagaaactcttccgttgtccgcgatttaccgattctcgggaaaataaagcgcagtgtggcttcatgctcttcatcgctaaatgtggacatggcatctgtaataaaaatctgctgatagccaagctgaaatgcctcccgtgctgtgctttccaccccgatattcgttgcgatgccgcacaatacaatcgtatcaatgccgcgacgtctcagctgcaagtctaaatctgtgccaaaaaaagcaccccattgccgttttgtcacagtataatcgccatcctgcacaccgatttccggaacaaattcggcccagtccgccggcatttcccctgaacctccctgcgcaggctcatccgtttgcggcttcagggcgtccgctccatcatgaaaggctacatttacaaagctgatgaacccgttatgtttccgaaattcatctacgagctttttcacgttcgggacaacctggccgctttgatcaatcggcacaatccccttttgtaaatcaatgataaccaatgctgttttttgaaaatcaatgttgagtgtattcatcatacgtctcctcctgatactgttagtgtttctcacattgcatattttactcttcacactgcctaagttcttttatgatgcttgtgaaattctcagaaggagcgttttctcatgatttttcttttatgtaatagtaacaggttgtgcatacgaacaaaccggcaagcacagtaatcataaggggcgtcatcacttcatcacctgcctgctgtctatcggttcctgcctgaaaatgcccatgaatttgcggcggtccatccaaagcaggataagacacataaccattaatatcgtgctaagatcctgcacgccaatgtcaaaacaatagttaatcaagacgatgttcacaataatgggcataaaaataaccgcccctaatgcagccgttcgcggaatcagtaataaaacagctgccaggatttcaccaaaacctataaacagttcatagacatgagaataaccgaaaaatgtccacgcgatcgtaaaccccttcccggcagccgcctcgatttcaggcgtcacctcgccaaactggccaattaccactttcgccagaccgtacacgaaaaaattaaaggctaaaaacaatcggaacgtcgcgggaatcgacttgcgtaccgctttcctcagcctgccgcctttcttcatcatacatccccctcagtgtattatttgatatagtacacttaatacagtatatagtattctaattaatgtcaattcccttttcagctcatatgaatagctgcttttatagatacaaagtcttatatcgtaaaaaatgtcgttctcctttctttccgtccctcgataacatttcttaaaaaccatgttaggaaatcttacacgaaaatgttttatcattcttttttctctataatgaagaaatataataattgctttttattctgaaagatacggaggaatgagacatgcaaatgggcgatacagtttttatgttcttttgcgctttactcgtgtggctgatgaccccgggattagcgttattttatggaggaatggtaaagagcaaaaatgtgctgagcactgccatgcacagtttctcttccattgccatcgtttccatcgtttgggtgctgttcggatatacacttgccttcgcaccaggcaattcaatcatcggcgggctggagtgggccggcctcaaaggggtcggatttgatccgggagaatacagcgataccatcccccactcgttatttatgatgttccaaatgacgttcgccgttctgactacagcgattatttccggggctttcgcagagcggatgcgattcggcgcttttcttttattctcggttttatgggcctctttggtttacacacccgtagcgcactgggtatggggcggcggctggatcggccagcttggagcgctcgattttgctggcggcaatgttgttcatatttcctccggtgtggcaggacttgttcttgccattgtgctcggcaaacggaaagacggtacagcgtcttctccgcataacctcatttacaccttcttaggaggagctttgatttggttcggctggttcggctttaacgtcggcagcgctttgactttagatggtgtagccatgtacgcgttcatcaacacaaacaccgcggctgcagccgggatcgccggctggatcttagtagaatggattattaacaaaaaaccgacaatgctcggagcggtatctggcgcaatcgccgggcttgtcgccattacgccggctgccggatttgtcacaccgttcgcttctattattatcggcatcatcggcggggcagtttgtttctggggagtattctcgcttaaaaagaaattcggatacgacgacgcgcttgacgcctttggcctgcacgggatcggcggcacatggggcggaatcgcaacaggattattcgcaacaacctctgttaactcagcgggcgcagatgggttattttacggtgatgcaagcttaatctggaaacaaatcgtcgccatcgccgccacttatgtttttgtatttattgtcactttcgttattattaaaattgtaagcctcttccttccccttcgcgcaactgaagaagaagagtcacttgggcttgacttaacgatgcacggggaaaaagcatatcaagattctatgtgaggagtgacgctatgagcggtcaaatgttcaaggtagaaattgtaacgcgtccggcaaattttgaaaagctgaagcaggaactcggaaaaatcggagtgacctctctgactttctccaatgtacacggctgcggccttcaaaaagcacatacggagctctatcgaggggtaaaaatagaaagcaatgtatacgagcgtttaaaaatagaaattgtggtcagcaaggttcctgttgatcaagtgacagagaccgctaaaagggtgctgaaaacgggatcacctggtgacggtaaaatatttgtctatgaaatcagcaatacgatcaacatccgcacaggcgaagaaggacctgaagcactttaatatcggtacgagattcggacactccggatctctttttttgtgcacagaatcccccccagaaaccgcgattcctcttcgaattctcttcaagcgccgttatttcagacaatctctatttttatttgaaacttttcatgagtaagattagtctactaaatataaaaatgtaaaaggtgattatttgaactacgaaatttttaaagcaatccatggactatctcatcacaattcagttctcgattccattatggtcttcatcacggaatatgccattgtcgcctatgcccttatcctattggcaatctggctgttcgggaacacacaaagcagaaaacatgtgctatacgcaggcatcacaggaattgcaggccttgtgatcaactatttgattacgcttgtttatgtcgaaccgcgcccgttcgttgcgcatacagtgcatacactgattccgcatgctgcggatgcttcatttccaagtgaccacacgacaggtgcattagcgatttctattgcgatgcttttcagaaaccgcaaaatcggctggccgcttgtcatttttgggcttttgacaggcttttcgagaatttgggtgggacatcactatccggtagatgtattgggcagcctcgttgtcgccatcattatcgggttccttttctttagattttcagatctgcttcgcccgttcgtcgatttggtcgtgaggatctacgaagccattatcaataaactgacgaaaaaaccaaccgatcaaaatttctaagaaagacaaaagccggcgtctgaaatcaagacagccggctttaatatttctcatacatctcttgttttcttcgcttcgccaacacatataaaccataaaacaacccaattccaacagcatcgatgagcacatcccggatacaaccattcctgctgaagaagagctgaagaacttctgtgaaaaaagcaaacgcaaatgagccggctgcagctgatcttatgctgccccgctgtttccacagcaaatatgtcagcacaaagaaggaaaacgcgtgtccgattttttgaataaacgcttcaggtacagtaagctcagtaaaatccataactaaaaattgagacagatcagggtgcggctgaaaatgaaaagccaccgtttgcgatacgaccatgccgctgaagctttccgtacagacagaaagcaggataaaaaagatccagcctgcgagcaataggcggttcatgacataacctcctttataacgtacgtgcctacatgtaactacatagacggtaaaacaaagcaaaaagtaacagaaaaaaacgcccatcacaaggatagacgttttcttcattaagactgttcagtgtcttctgttgtgctgctttctttagaaccagatttgtcagttgaatcatcctttttctcaccggatttttcttctgttcctttttcagttgatccgtcctttttctcggaagattgctgaatggattcttctgtttcttgggtggcagctttttcttcagcagctgctgctttttcaatagaagaaactggtttgtccataaagtttaacggattcattgcaaccccatctttacggatttcaaagtgcacgtggtttccgctgtcttcactgtaaaggttcttgccagattttccgatcacttgattttgttttactttgtcaccttgctcaacgcttacttcggaaagagattgatacacagtcgataaaccgtcggcatgttctacttccacaacatatcccagcactggatctttttcagctttaacaaccgtaccgctcagagaagcagagacatcgaaatcttttccgtctttctcagctaagtcaattcctttgcttaggctgtacgtgttattataggtaacgagtgctgcttctttctcttcttttgcggcatcggtttcatagaactttttcacaacagaaacgttttcagaatcaacaaccggcattgcgacattttccattgactttcctacttcaactgcatcgtcgttgttgtcatatgcggagtttccgccgttatcagccaactgatcctttacctcatcatttgatactgattgataccaaaggacagctgttaaaatgacggccgcactgactaagtaaattgcagggaacacccagcgtttacgaaaaaactgctgaagttttttgacttgagaagttttcttttcttcctctctcattgtttcatcacctcagcaacattctgaacacttttctgaaaatatatacaacctatccaaaaaaacttttttagatgtagtttgcacagactgaacgaaaatatgtatttttttgagaggagtgccaaaaacgtatgaacatgacattgcgtcttgctgaacatagagacttggaggctgttgtggcgatttataattcaacgattgcttctcgaatggtaacagccgataccgaaccggtaactcctgaagaccggatggaatggttttcgggacatacagagtcacgtccgctctatgtggccgaggatgaaaacggaaacgtcgctgcctggatcagctttgaaacattttatggaaggccagcctataataaaacagcggaagtcagcatatacattgacgaagcatgccgcggcaaaggtgttggatcatatttgcttcaagaagcgctccgcattgccccgaatcttggcatccgctcacttatggccttcattttcgggcataataaaccaagcctgaagctgtttgaaaagcacgggtttgcagaatggggactattccccggcatcgccgaaatggacgggaaaagatacgatttaaaaattttagggagagagctttcatgattagtctggataaagatgaaaacgaaattgaacatcataatgaagaaaatagccttgttgaacaggagactgcacctgttggacaggagagccgccagctgagcgcctccgctgtcaagtcgctatccgacattgccaagtggggcaaaatttctggcatcttgttaatcattatgggatcgcttgtcactctgtctgttttgatgacagtgattggcgccatcccgggcgtgctgctcattatatcaggcgtatttttgatgcgctcagcaaaagcagccgcggaagccgaaggaaatctagccggcagcgctggcgaaagcatgcttgaaaattacgggacatttataaaaatgcagctgttttatgcagcatccagtatcgttactgtcctgatcgggatcattgtagccattttcgtgctggtggtaatcggcattgctgcttttgagaacacgccttcgtatgatgatccggattcttattattatgaggatgatccggtgtttgaataatgatgagacaggacagggcatgagttccatataaacggaaccatgcctattttatttgactattcaaagcaggccggcgtaaacaccaaatcctgaagcaagtacaatagacatctctagtagaagaaatcaacaaagcaacgctgttacccagaaataaataacaaaaaaactacctatgaggtcggaatctatctgaaaccgcgctttttatttcgggtgtctgcatgcaaaaaaacacacccggatcgtctggaaaatctcaacaatccgggtgcagatcttctttaatacatttttttgcgtctgtcttcctcagtcaaaaattcaacaaaactccgcatcgcaaaaggctcttcctttatttgccgtgcgtaggagcttttccgctcttctgaaaggatttcgctctttttgatcctgttcagcatatagatgtgaactgttttttggatttgtttatgctgatagcctgcctctttaaaaaatgcgagcccgagcgccgccaaaagagcgaatatgcctgcgctgatcagggactccctgtcagctgaagcatgaaatagaaaagcagctaaattaaagagagagaatgcagcaagcggaatagcaagaaaacggtaaatgacggtttttttcatgaaaggctgtacggccttttgaattttttgcatttctgttttgatgaaccccggcatttgttcgactctgtaaaagttcatataatcctccccctttatttgatgtttcaagcttcacgaacgttacatatgtgtttattttaacgcaggtgcaagctggttttaaagaaatctgcccgtatttttcacgaagaatctggatcgccgctctttattcttttaaaatgtgagtgttataatttgtaatgggaatcagatcactgttattcatggaatactaatggcaatcttcttgataaatatgaatgagcggggttacaaagtgagtatttcttccatccttttatcactttttttcattttaaatattcttttggccatcattgtcatcttcaaagaacggcgcgatgccagtgcatcttgggcgtggctgcttgttcttttctttattcccgttttaggctttattttatacttattattcggccataatctcagacgcaagcatttgtttcaatgggaagaccggaaaaagattggaattgaaaggctgctgaagcatcagcttgaagatttagaaaccaagcaatttcagtttaacaaccgggcaacctttgataacaaagatttaatttatatgctgattatgaataaccatgctgtgtttacagaggataattcagttgacgtcattacagatggacgggataaatttcagcggctgctgagtgacatttcaaaggctaaggatcatatccatttacagtattatatttataaaggcgatgaattaggcaaaaaattgcgggacgctctcatccaaaaggcgaaagaaggtgttcaggtcagagtgctttatgatgaactcgggtccagaacgctgagaaaaaagttttttaaagagcttcgcgaggctggcgggcatgtggaggtctttttcccgtcaaagctcaggccgattaacctgcggctgaattaccggaaccatcgaaagcttgtgatcatagacggtatgaccggttatgtcggaggctttaacgtcggagatgagtatctagggcttaatccgaaattcggttattggcgggatacgcatatccggctgcaaggaacggccgtacacgccatccaaacacggttcatccttgactggaaccaagcttctcatcaccatacgctgacatatattccaaatcactttcctgattacggcccaaaaggcaacgtcgggatgcagattgtcacaagcggccctgattcggaatgggaacaaattaaaaatggctacatcaaaatgatttcgaacgccaagcgttccattttgatacaaacaccttattttatcccagatgcaagcctgctggatgctttaaggatcgcttgcctttcgggcattgacgttaacattatgattccgaacaagcccgatcatgcctttgtatactgggcaacactttcgtatatcggcgatctgctgaaagccggagccactgtctatatttacgataacggctttattcacgcgaaaaccatcgtggtggatgacgaaatcgcttcagtcggcacagcgaacattgatgtccgaagcttcaggctgaattttgaggttaatgcatttatatacgatatcaccattgctaaaaaactggtttcaacttttaaagaagatttgctagtatccagaaaattcacctatgaggagtatctgcagcgcccgttgtggattcgaataaaagaatccgtctcgcggctgttgtcgccgatcttataagatgtgcaaacccccggcctttacggccgggggttttcctgatggtcacagtaaatgatgatcgcctcccgcaaaaaagcggcaagaccttctccatattgattgattgaatcggtaaatcgctcgtcagtgatatacacttccccgagtcctctgaaaatgtcgagtgtgcaatcgtaatgatattggcaaatatgatcgcgaaatgcccccactgcggcctgaacctctgcatcatcgggcccatgcttcattcgcgccgcaattcgtctgtaaatcgaatcaaattcagccatgatcgagcgccaatcatctgccgagtatgcagatgtccttttctctgtttcttctgcgatttccttaccatacagctttctgacttcgtcagcgtatgtctgctgatgctcttcaatgtctttcatgcttaatccggcaaataaatccctcttattcatcgtttcccctccatcaacggacaaaagcgtcctgtcaattgtttgaatcatctcatccattctttgttttttcttcatcaatatctccttttgcgactgaagtgccgctttccggtcaaaattcggatgatccagcatctccttaatctcatccagacgaaacccgatttccttgaaaaataaaatctgctgcagtctttccaggtctgcgtcactgtacaaacgatacccagcatcagtaagcgctgaaggattcagaagctcaatattgtcatagtgatggagcgtccgaatgctaacacctgatatctccgccacttgtttaacttgatatttcatacataacacctcctcttttttatcgtaaacaatcacgcaacgttagggtcaatccccaaaatgttattttctatatacaaaacttctcacaaatagtgtataaaagaaaagtgagtatttttttgtaaaggggagccagtatacatgaatcctgaaacaatgaacaaaaccctcatcagcatttcgaaatggggaaaagctacaggcattttatttattattatgggcgcaattaccgcgctttcaggcgcgttcttttttctaatcggtgccgtgccaggcgtactgcaaattatttccggtatctttttgatgaggtcagctagggaagcaggccaaatggctgaacacaatagcggacagtctgaagacttaatgctggagaattacgcgaaattcgtaaagatgcaagggatttatttgatcgtaagcattgctgtatccattcttgcgattatcgccttcttcatctttttaatgcttgggattgctgacggccttttcagcgatacgtacagcacttattaatgagaaaaacccggagctggctccgggttttttattattccgcttcgcttaccactgtgaagcgttcatttttgtgttcgggatgttcaagctcgtccaacacggcaatggcataatctgcatagctgatatagctgtcgccttttgcatttacgatgacattgtcttttcctttttggtaagagccagtccgttttcctgctggatcaaaaaatgctgcaggactgaggaacgtccaggaaatgaagtctgtctgctgcaaatctttcaggttctctccttgatttgatgcagttggcaaatattctttcggaaattccggcgtatccattaaacgggttgttttggcttcatcaacaaacaggcttcccgctccgccaacaacaagcaatcttgtgcgcttcgcgtcctttaagatgttgatgagtgctcttcctgcttcaacatgaagatgttcttggccgggtgctgctccaaaagcgtttacgactgcgtcgaaaggcttgatgtcttccgcagtcagttcaaacacatctttttccaaaaccgctacgtcctgcccctgcacttttgaagcgtttctgacgatggctgtcacttcatggcctcttgttttcgcttctttcaaaatttcgtttcccgctttcccgcttgcgcctataataccaattttcatttttcatttcctccttatttgtaacaattttagttacatgttagcggtgagaagtcatcccttttgattaaaagagatgattcataacatcttttaatgacttgcttgccagttcattttccatcgctctttgcacactttcaaacgtttcatccagagcgttctgaatttttttccctaccggacatttcggattcgggttttcatgaaccgcaaagagttcttcttgcttttggacagcccggtacacttctaaaagagaaatatcagcaggatcttttttgaggcttgcacccggcacccctgcgcgtgatgtgagaatatcagcttttttcagcaggctgatcattcttcgcacaactaccggatttgtgttgacactgtcagcaatgatttctgaagatgttttttcatccatcgagatgagggataaaatatgaatggcaacagcaagacggctgttaatcatgttttttcaccaccgttgtaactataatagttacatttgattcgtttgtcaacatctaatatacactaaatacacgggttttgtgcaccgtttttagtcaatagaacggccggatgcactccggccgcgtcttatcaaaataagaaatatctttgtccaagtgggacataatcgacaggctggcaagacaattcctccccgtcagcaaagacctgataggtttttggatcaatctcaatctttggcaaagccgaattcagcttcatatccagcttgctcagctttctgatatttttgactggagaaatccttttttccagccctaagctttctgccacaccacgctctatgcttgcctgagacataaatgtaatcgaggttgagcggttggcttttccgtaagacgcatacatttggcgcatgaaaaccggttcaggagtcgggatggacgcgttcggatctcccatttgcgcacgtgcaatcatgccgccctttaagaccagttccggtttcacgccgaaaaataccgggtcccacagaacgagatcagcaagcttccctttttccaccgagccgacctcatggctgagcccgtgcgtaattgccggattaatcgtgtatttggcaatgtaccgttttgcgcgcacattgtcattcccgttttcaccggcaagagcgccgcgctgttttttcattttatcggctacctgccatgttcggatgatcacttcaccgacccgccccatcgcttgggaatccgatgatgtcatgctgatcgcacctatatcatggagaatatcctccgcggcaatcgtcgccgccctgattctggaatggctgaatgccacatcttcaggcactttcgcatctaaatggtggcagaccatcatcatgtcaagatgctcatccatcgtattaacggtataaggaatggttggcgttgtagatgacggcagaatgttcgcgtaagaggcgagcttcataatatccggagcgtggccgccgcctgccccttcaatgtgataagtatgaataacccggtccccgatcgcgtcgagcgtgttttccaaaaagcccgcttcgttaatcgtatcggtatggatggcaacttgaatatcagcctcgtccacgacttccatacacgttttaatggcgcttggcgtcgtgccccagtcttcatggagcttaaggccgatggcgcctgcttccacctgctcgatcagcggcgctttatcggatgcattcccttttcctaagaagccgacattgatcggaaactcctcggccgcttccagcatcctcgccatataccacgccccggacgtacatgttgtcgctttgcttcctgtagcgggtcctgttccgcctcccaaaagggtcgtcacacctgaagaaagcgcaacttccatctgctgaggacaaataaaatgaatgtgcgtgtccactcccccggctgttaaaattttgccttcaccggaaatcacctctgtccccgctccgatgaccatgtgtggatcgactccatccatgatatcaggatttccgctttttccgacaccgacaatccggccgtctttcacaccgacatccgctttgacaatgcctgtgtaatccaatagcacgacgttggtgataactaaatccaaagcgccgtccttccctgtgattctgccgttttggcccatgccgtcgcggattgtttttccgccgccaaagatcatttcttcaccatatactgtgaaatccttttcgacttcgatccataaatccgtgtcgcccaatctgattttatcgcccgttgtcgggccaaacagttccgcatattcctcccgtgacattttcatcggattacaccctccatccagccggcttgttttaagttggccaacgttttttctttgccgcgttcatcgataaacgtgtcggccattccgttcagccctttaattgtcttgcgtcctctgatttccactagtgagaccgttttctgctctcccggctcaaaacggaccgacgtgcctgatggaacatcaagacgcatgccgatcgccagctcacggtcaaataataaagccccgttggcctccgcaaaatgaaaatgcgaaccgacttgaatggagcgtgatccggtgttttttaccgttacctcccgtatctcacgcccttcattaatcgtaatggttccctcagcaatttgaaatgctcccggcttcatgacttcacctccgcagaaattggctgatgtaccgtaacaagctttactccatccggaaatgtggcctccacctgaatgctgtccagcatctcaggcacaccctccatcacatctttttccgttaatacatggcggccggcttccatcagctctgctactcccttcccatcacgtgcgccttccataataaagcaggtgatataagcagcagcctcaggatagttcagcagaacgccccgcgcctttcgctgtttggctaattcccccgctgcaaaaatgagcaatttctcttgttcaactggtgtcagtttcatctgtagtcctccttcttttgtcatataaagcagatgcggctactacgaatttgcggaacagtcaggcgggacatcacctccctttcttcgggaatgggggtcatacggtaagatgcctttcaaagcggcatgccgtttcttcatcagccttgccatggtcaacaaccgttcccctgtcgatcacggaaagatcagattaacgcgttttccagactgcgctcgactaagataacaaatgtctttttttctggaaatttctataataacttgtctgactagttcgacaattaaaatctgaattccttccaattgtttattaagtaaaatatttttcagatttaccatcagcgctctggcgattgcaagctgctgctgttggccgccttttcgctttgaacaaacgtttgattaaaataaatagcccccctgtttagccggaagcaggcctatggagtggatggccgactccatttcggcctaatacagcgacaatctgccccgggcgaagctaaggctgtgcaaaaccatcgattgatcataaccagacgttacattcctgatggcagcccgttgttttgctccgcaaccggaagtatggcatggaggccagtctgaggcgccgacctccacgataccgagaacccaactattgccattaactccgcatcatggacggtcacttcgctgatcgccaccgttcctcttaatgagtgaagaattccggccttcactgaatccccgcttgtgtcgatatcaactgttttctcgcactcccgtggcttccgacactttcttcggtgcagtacattcagccatcaaaacccctttgtttgatttcttcaaatgatgttataaaagtttacaacttatgtcatcattatatagaagaggcctattaattcaaagaatatttaaaaaatttagttaccttgaccaaatcagcttctttttttgttatatttattcacatcagaaaaagcgaaaaaaaaagacaagaaacatttcgtttcctgcctcttccgtacgattaatctttatctgaaaatttatccttggctttcccgatatccttttggatttcgccttttgccttatcttttttgccttcagcctgcatgtccgttctgtcagccatatctccgactttatccttcacttctcctttggctttattgaagccgcccttcattttgtcttttacactatcgttacccatgttaattctcccctctcaattatgtgtgtacttgttaacttcccgatctgagaggcaataaacattctaatgttatttatcgatttcgtagcgctctccgtaacggagcaccttgtatatcgccagcccgtctgatgactttttctccgaatatcggaccggcagcagggcaaaaaacacataatacgtagaaaaatagacaaactgatagaaaaacacattcggctttaatacactgtgtataatcagcagattgattgcaaaaatcgtgatgaggttaaacaagcagcctcctgcatacacgagtgcatttgagaatcgattgtcaattttcaactccccgtaccggcaaaaagaatcgataaaataaatcgttctgaaccgtatgggtccaattttaagcagcgtttttcccatgcctatatccaacgatccctttccgccaaaaataaaagccataaagctgtgccctgaaacatgtataatctgtacaagcggcagaacaatgaggaaagaccacagaaacttcaccatatcattaaaaccaaacattgaattccccctcacatgcatatctgcatcccaaaacggcttttgttcaaaaaacagtgctgtagcgatttttcctgttctccccggaaataaacgttccgatgctcccctttttttgcataaaaaaaaaccatctgccagcagatggttttgtctcatacttcatataaacaatcgttcctttgaatcatctctctcatgctgaccgctttttcataaaaatacaccgcttctttatattgttcgcgatgactgaaataagaggcagcatctaaagcaaattcttcaatatatacatacaggcccttttcttccatataatcaaatacttcttgaatcatatccaaattgacagattccacatataatgcctgcagaaatttatattttgccagactgaagaagtcgtttcgtttttgggcaatggcaatccctttttcatagtaccgtatcgcggcttcgctatcttgttttttgaaaagaacgcgagtcaggctgaagagcgcttttggaagctgttccagctgataatcctcgaagacaggaagcgctttttcaaagtattcggcggcctgatccagctcccccttgtcatcatagcaattcccgatattataaagggctgatccgatcaaacggggctgtccttccaataaagcaaggcgatacgcgtcatccaaatgctcaagcgctttttcataatttctgtagtctatgtagtttcctgatatgacgaaatggcattgaattcttctgactctataaaaatcgtgagccttatacgtctccagcgcctgtacagcgtggttcatagaaaagtgcgtctgcttcataatataaaagacttccgccactttaaaatgaaattccgctctttcaatttcatcttctacaaacgcaagcatcttctcagctttccgataaaaggatatagccgagatgtaattgttctgttcaaattcgtacattcctctaaacaagtgaaaataatactcagataatccggagatgctgtcctgattgctttccagcgttttgatcaattcacgatattgaagctgagattcctcgtgcaggtcaggctttacgtaatccagcataatttggtgccggtagctgatcagctgataatacaggagaagcagctgatcctcttccatctgttcgatatctagatcaatttcttctttcagctttacggcatcagccacttgaaatgctaaaatgtgcttataccacttattgattttcactcctacttgagatgacgggatctcgtacgcggccatgcccctccaaccctttctattttctaattggttatattttatcataatgtatggctttggaattaaattttcttacaatgattccttctttatgcctatccttatatatttcggtttttctacgtattttttgcactcggattctaataaaaaagcttaccggacagtgccgataagcttttgacttcaaattaaccgccaatataagacatttccactttctttttgccagatgcttttgatagcgtacgatcgactgaatactgatcgatccgatttttccatactgtcccgatcatttctgatagttcgtcatcacttaattcctggcgaaccggagctctgaggtcaaatccgcttgaagcgaataagcaggtaaacagctctcctctcgcagaaagacgggctctgttgcaagatccgcagaacgcatcagatacagatgatatgacgccgatttctccggagccgtccaagtagcggaatctggaagccacttcgcctatataattaggcgctatcggctcaaccggcatgtgttcattgatcaaatctatgatttccgcctttgtcatgacgtcttttttttcccattggttggtgttgcctacgtccataaattcaatgaatctcaggatatgccctttttctttaaaataacgggccataggcagtatatctttttcattgacgcccttttgaacgaccatattgattttaacaccgagccccgcttgcttcgccgcttcaatgccttccagcaccttgctgacagaaacaccgcgcccgtttatcttcttaaaacgctcgtcttctaaagaatcaaggctgatcgtaacccttttcagcccagcctccttgagcctcttagcataaacaggcagcagtgatccgtttgtcgtcatcgcgatgtcacgaatacccggtatgcgggccagttttttgattaattccggcatatcctttctcatgaggggctctccgccggtcaagcggattttttcaacgccaaatcttgtgacaaacaatgtcgcaagccgttccagctcctcaaatgaaagcagctcctctttctttaaaaaaggataatccgggccgaataattcggcgggcatacagtacgtgcatcggaagttgcagcggtctgtaacagaaatgcgaaggtctctcagcggtctgtttcttttatccaacatctgacgcgactctgtaatcatagctacagccccttcctactccctgattctctcagggtgtgtatatacattaaatgatccgtttctgacaaatccaatcgctgtgatattcaattcttcagccatttgaatcgcaagctccgtcggggccgatttggaaatgacaatcgacacgccgattttggccgcttttaacaggacctctgatgagattctgccgctgaacacaatcagtttgtcgcgtacggacatcccgtttagaaggcagtgcccgtatagtttatcaagtgcgttgtgccgaccgatatcggtgcgcatcaacagaagcttctctgtgtcgcaaagcgccgcattatggacgcctcccgtatcctgaaacgtcccgctcccttgctgcatgtctttcataagcgccagacatgcctcaggcgatatcttgatttggctgacagccgtcttggctgttttgacatcctgctgaaaataaaaatgacggccctttccgcagcatgagccgatcacccgtttcgtataatccttttgatccaatgtctcagggtgaacgaggtcgacatatacaaaaccgagactttcatctattgtaaaccttttaatttctttttgaaatcgtataacaccctctgatgcgagaaatccgatgacaagctcttcgatatgctcaggcgtacaaacgagcgtcacaaattcactgccattcagtatcactgtcaaagggaattccgtcaccatccggtcttctactttgcttatttccccttgttcatagcgccatacatccctgaccgcagttactttatcgttcaatgtctcttcccctccgcaatgttcctgcctttatattttttcacactcctcggattttgtcgaattctgagacacaaaaagagccctctatataaagggctttcacaggatgtgatgacggcggtgtttaggcagggcgcctaccgttccttttataacacgtgagcaccaatgtgcattgacaacaaacgcggggtttgtcgacacgctgagagccctctatagaaaggactctatggttgattatactgattcttttttagaaccgtaaacagcacaatagctgcgatcaaggtgagaatgctgacaaaaaagaaggctgccagttttagaagaacaccaagcaatatgaatgcaacggtggctataagaaaaatcattccgaataatttcatatgttcaacccctttttagggtatcattcccgcccaaactgtttttaaaccaataaaaaaaggcgcctgggggagcgcctgatctttaggttccttactcagtaaatttttgtgcttctttttcccaagcctgttcgaactcatccgcactgttcgctgaaatatattctccgccgccagcgacagctgcttgtttcatctcttcattacccttgacatcaaagttgaagccaatgatgtttacaatcgtatccacatttgatgcacggagcttttcgatttctgccgcagggtctccgccgcacgtttcttcaccgtcagtgattaaatacaccacgtttttcccgtctgcgtcaaatgcctcaaattcttttcttgtgtctgcaagtgctttggcaatcggtgtccatccagtcggcttgagctcactcaatgaattgtcaaacagggatccttcatatggatgaaggccgtaaatagtttccgtcgtactgcacgaaagggctttaccggacagtttattattccctgcatgcccgaaaacgcgaagcataagatttgtatccttcggaagaagttcggcaaaagattttactgattttttggcaatgtctattttgcgctctcctcctgttttttgaaccatacttccgcttccgtcaaacaaaacagctacatttgtatcagcctgtttctcagcggcaaaagacggggaggcaatggaaacagtcaacaatccaatgataccggcagccagcaattttttcatatgattacttcctttctttttcatattttccaactatatgttggattcttctttatgctagaatacgaaaatgcaaaaagatataggacatgctgccttttgtgctgctttcacgatctgtccaaaatcgcttgaaatgccgttcatttttagccatttccgcccagaaagcataaacagattgtgtgatcattcattcttttttcgccttgattatgacagaaaaacggaaatctgctactatgctacaggcagacagctaattagttttgaagtttttgttacatacaaaaagaggctgaccatcaccagcctcttttttcttatttagataacattagtgattgctgagtgaaaattttctcaacatctttttgggtataagccgggaagtattcaccgccgcctactttcgcaattgcgttcagctggcctttgtatccctctttataatcaaagccgatcacattaacagtgatattgtctttttgcagttcctttgctgttttaatcgggtttcctccgcacgtttcctcaccgtctgtcaacagatacaccactttttccccttttgcatcaagctggtcaaaagaagatttcgcctcgttcagcgctttggcaattggcgtccagccagtcggcccaattgtattgagagaattgaggaagctttgctcgttaaagctttggaagccgtatacgttgcgaatggcttcacatgactgaacttttccggaatttttattgtttccttcagagccaaacacgctcattttcacctgagttccttctggcagtgagctcgcaaactttgaaatttcttttttggctgaattaaatttagatacaccgtctattcttttcgccatacttccgctggcatcaagcaagaccgccacgttcgccggcgctttagcctccgtttctgacttttcagctgcaaaagcaggtgaagttaatccaaaaagcaatcctgtcatcatgatcagtgaaaatcttttcttcatgttcgtacccctttaccaatttgtttctgcgtgcagatgttcaacgctgaacataatctatcgtaatcaacaaaaaccgagaaataaatagggcgggcttccccattgctgttgtttacttttgcatagaaacctatgtttttattagtgatttccacctaacgcccctatgaaaagagaagattgtccgcctttcggctttcgttatatgagtctgtcgaagtctgtcgacaaatgtggatgactttaccacaatctcaaagcctgaaatcaggaaaaaaggactgatccttaaagacggccagaagctcctctaaaccgtttcagccgctcttagataaaagacattcaagaacagaaaaagacgcccaaagagcgtctttttctactttttcgccatgtatttattcaaaaacgcatctgcctcagaaatttgtgtgccttggtaatagtactttacaatgtcatcaaccgttttgccttctttggccataaaattcgctccgtattggctcatcccaacaccgtggccaaatcctctcgtcgtgactgtaattgtgtctccatttcgcttccattcaaaatcggcggagttgagacccagcttttcacgtatgtctcttcctttcagcgtcttgccgttaatgacggcagttgcgacctggtggcccggtgtctcgccggtaatcttccctactgcgctagatccatccagcttgacgccaagcttttgctgaaattctgccgctgtaaaggttttcgttgccttatatttcggagactttttatcccatgggcttttgacgctttttaaatatgggatagcacttgtccaataagcttctgcattctctgtgtagccgttgcttgtggagaaaaaggatgcttcaatcggctggttgttgtacgttaagattttgccttgcgtactggctaccgcagctgtgattttcttcagttttgtctcatagcttgtgccccactgttttttcagctccgctttgtttttatacacctggaacatctgtgtatcatccaccagtgagcctttaggagcctcaaccgctgaatttgacaccatcagtctgacaataaatgttctggcggcgagggcctgggctttcagtgcttcagattcaaaggttgccggcatttcggaggcgacgactccaatcacatactcttcaagcggaatgttttctacggattgatttgcggttcgatagacgggaatagaaacaggtgatgctttcaatgtttctgctcctttcgatgctggtttcgtgctgactgctgtcttttctgattctacactggcccccgcttccttattatgctggaatggtataaccaagagtgtgggaaccaagagaatcaatgcacatagtacggatagtgtgattgcgaattgtttcatattcagctgcctcctgctcgggattcgactctagtctagtctatgggcagggacaagctaatatgactctcgttttggacagaaactttatttgtcatttacgtattcttttttgctattttgcgcataatgatgataatacacaaaaaataaaaaaccagtatgccagagtgacatactgattttcaagtaagtttatgcatttaagtcagaaacgacttctttattctcttgctcagaagcagactcatcatttacacgttcgatgtctgcgcccagagcggcaagcttctgatggaaatcaacgtaaccgcggtctaagtgcttcaattcagtaacacgtgtgtgaccttcagccactaaccccgcaagaatcagcgctgcacctgcacgcaaatcagtcgctgcaacttcagctccctgaagctgtacaggaccgttaatgatgacagaacgtccttcaatcttgatatcaccattcatacggcggaattcttccgcatgcataaaacggttttcaaaaacggtttctgtaatcatgcttgtgccgcttgcacgaagcagaagcgccatcatttgtgactgcatatcagtcgggaagcccgggtgaggcattgttttgatgtcaatcggtttaagctctttcgggccgatgacacgcagaccttcaccttcatccttaattgttacacccatctcttccatttttgcaattaaagaggtgaggtgttcaggaaccgctccttttactaatacgtttccttcagtgattgcagcagcaaccataaatgtgcccgcttcaatacggtctggaataatatggtgttttacgccgtgaagcttttcgactccttcaattttgatggtgccggtgccagctccgcggatttttccgcccatgccgttgatatagtttgctaaatcaacgatttcgggttcttttgccacgttttccagcgttgttgttccttcagctagagcggctgccataatcaggttctctgtagctcctacacttgggaagtccagataaatttttgcgccttgcagtcggccttttacttcagcttcaatgaagccattaccgactttgatttctgcgcccattgcttcaaaaccttttaaatgctgatcaatcggtctggaaccaattgcgcatccgcccggaagtgcaactcttgcatgacctgtacgcgcaagaagcggccccatgacaagcacagacgcacgcattttacgaacatattcaaaaggtgcttcagtttgcaaagcgtatgaagcatttacagtcacttcattattttcaaaatgcacatctgctcctaaatgacgcaacacttcgttaattgtatatacatcggagagcgtaggtacatcacaaattacgcttttttcttcacttgctaataaagatgcagcgataacaggtaaaacggcatttttagcgccttcaactttgactgtgccgtttaacttctgaccgccgcggacgatgattttttccaaggtattcccctccgcgtccctaaattctctatattaatattcagtcgtaacgattggtgtgccaaccgtaacggtatgttttccgcccattcctgcacttctaagtgcaatttgcaaattcattttatgtttcgaggtcataatgtactcttcccactcatctgtaaacgcagaaatagaaacgaaatttggctcaactacatgttctactgatcttgcttgaaattcatttaataactgatttgcttttttttgcaaaacaatattcatattatcatctaagtgaccatttagacaagtaaaaataactactttttcttggaatatcccaagtgtctcccgttcaaactgttcatatgtatcattccagctatccggtgtctctagactcatttgctcatataataaatacgaagttggattgtgttttttgagggttgtgacaagctgcagtctaaaagaagatcgattttttttgtcagtatatgtgccaattgcctttatcattttatcttcccgtgcaatcacccaatcatattgacgatactctgattttaaacgttgcactttttgataaaattctttttcggtcagtgacatgttttgttttgcatgcaatgtccacttatctattgacacatcttggcgttccatcccctctgccatttgtgctaacggcgttaattcactcgcatgaatggtatggaaaacagcaatgacgaagcttaacatgacggaaatgataatagcgcggcttacttgttttttcttcatgttcatctctcccccttatccccagttttaccggaggcaagaggcgccatacgtaaaaatcttcgtcaaaactcgagctattcgcttcattcaaaacctattaaaatagatagggaagctgctgtgaataattgagataatctaaaaagaaattggcaacggccgttccaatggcaattgtcagcaaaatcatcaggagtcttgcctgcacgactttgccttttttgattaacggatctatattgacggcttgcaacgcccaccaagtcactgctataaaaatcaggtgaacgacaatgccgattgcagcctgctgtcccaatacactcatctattacactcctttctctgcgttcataccctttcttattatataagaagcacagataaagatgatacattttatacagaacggaataatcacccaaatctagggctaatccccgcttaaagtgcgattcttttacatggtatactttattggaaaggagctggcaaatgtgaatcattctttttttcagcctgaaaagcaatatggtgaggacctgccaatttttgatcaggaatgggaagcaattgcattctattatgattatagacagtcacagattgaagaactgaatgaattgtgtcagttttttaacatttctcttacctatacgagagaaagccttgaagagcttgaaaacctctattttcaaagtatacaagaacttttgcttgctgattggaatcttcctattgaagaattcgagaaaatgatcagtgtttatcttatagattgtgtgattgcccgccatgaagatgctgaatgggttgtaaaaccttatccctataaagacggcgcttatacacttggctttagaagacatcgcaaatcgtggcatacaatgaatgcctgtgatggtttatacctgcgtccaaaagaggatcgcccgctgttatcgctgtttgattctcttgtgcgttcataaaaaaatccttctctttatgagaaggattttttcttatttccctgctacatccaatctgttcaaagcccgctgtaacgcaagctcagcccgacgaatgtcagtatcatctgattgagaattcaaacgctcctgcgcccgctggcgtgcagcttcagcgcgctctttatcgatgccttctgctgtctcggcagcctgggcaaggatggtgacctgatcaggacggacttcgacaaatccgccgctgacggcaaccatttcagtctgcccgtcttttttcagacggacagcgccgattttaagaggagccacggttggaatatggcctggcaaaataccgagatcgccgctttcggctctcacactcaccatttcgatatccgcatcgtatactgggccgtcgggagtaacgatattgactttaacggtcttcatgcttttaccctcctaggaccagattaaacttctacacccatttcttttgctttctcaacaacttcttcgatacggcctacaagacggaatgcatcttctggaagatggtcatatttaccggctaagatttctttgaagccttgtaccgtctcttttacaggcacgtaagatcctttttgtccagtgaactgttcagccacgtggaagttctgagaaaggaagaactggatacggcgtgcgcggtgaacgacaagtttgtcttcctcgcctaattcatccataccgagaatcgcaatgatatcctgaagctctttgtaacgctgaagcgttgactgtacttcacgcgcaactgcataatgctcttccccgacaatttcaggagcaagggcgcgtgatgtagatgccaacggatcaaccgcagggtaaatacccatttcagttaatttacgctcaaggtttgttgtcgcatccaagtgagcgaacgttgtcgccggcgccgggtcagtgtagtcatcggcaggcacgtagatcgcctggatagatgtaactgatccaacgttcgtagacgtgatacgctcttggagctgacccatctcagttgcaagcgtcggctgataaccaaccgctgaaggcatacggccaagaagggctgaaacctctgaacccgcttgtgtgaaacggaaaatgttatcgatgaagaacagtacgtcctgtccttgtacatcacggaagtgctcagccattgtaaggcctgtcaaagcaacacgcatacgtgcgcccggcggctcgttcatttgtccgaataccatggctgttttgttgattacgccagagtcactcatttcgtagaaaaggtcgttcccttcacgagtacgctctcctacgccggcgaatacagagataccgccgtgctcttgcgcgatgttgttgattaattcctggattaatacggttttacctacaccggcaccaccgaacaatccgattttaccgcccttaatgtaaggagcaagcaaatcaacaaccttaatacctgtttcaagaatttcaacttctgttgaaagctgatcgaatgaaggcgcctgtctgtgaatcggatcctttttcgcatccgcaggaaccggctcattcaaatcaatattttctccgagaacgttaaatacacgtccaagtgttacatcaccaaccggtactgagattggcgctcctgtatctacagcttccataccgcgctgaacaccatctgtagatgccattgcgattgtacggactgtatcatcacctaaatgaagagcgacctcaagcgttaaatcaatacctacttcgttttcacttgcagctggctgtgaaattttaatcgcattataaatttcaggcaagtgaccgtcttcaaaacgcacgtcgacgaccggtcctaatacctggctaacgcgtcctttcttcatcgctatccctcctgacaaaatctttctattctaaagcggctgctccgccgacaatttccgtaatttcttgtgtgatggctgcttggcgagcgcggttgtaagaaagcgaaagtgaatcgataagttccttcgcgttgtctgtcgcatttttcatcgccgtcattcttgcagcgtgctcacttgctttactgtcaagaagcgcaccgaagattaagctttctgcatattgaggaagcaaaacctccagaacctcctcttcagatggttcaaattcataagacgccgttctttttccgccgccgctgcccaaatcagataacggcagaagttttttctccgttacttcttgagtaatggcgctgacaaaatggttataaacaaggtgcaattcatcaaacgcaccgtctataaacatttgaatcgtttgacgggcaagatctttaatttctgtaaacgttacttcatccccaagtcctgttaactcggaaatgatcggaatctcccgtttcttaaagaaatcacggcccactcttccgatggcaatcaccgcatactcatccttagactgatgacgttcttgcatggcctgataagcactccgtaaaaccgaactgttaaaagcgccggcaagaccgcggtcagacgtaatgacaaggtatgccgtttttttcacttctctgctgagaagcatcgggtgcttcacgttgccggaaactcttccgacgtttgacacaacctcttggattttatccatatatggcacaaatgattttgcattgttttcagcacgattcagcttagccgcagataccatctgcatggcttttgtaatctgacttgtttttttcgttgacgtgatccttgacttaatatcgcgtaatgaggccaaagatttcaccaccttttctcttcatctgcgtaaaaagagagaaaaagagaacctttttctctcatcagcattcgagttagttgcttggtgcaaatgtgcgtttgaagccttcgattgcagcattgaagtcttcatcagcaggaaggtttcctgttttcgcaattccgtcaagcaggtctttatggttttggtcaaggtacatgtagtactcttcttcaaaacgtctgatatccgccacaggaatatcatcgagatatccttttgtcagcgcataaagaatggctacttgcttttcaaccggaagcggcttgttcagatcctgcttcagcacttcaactgtacgcgcaccgcggttcagttttgcctgagtcgcttggtcgaggtcagaaccgaattgagcgaatgcttccagctcacggtatgacgcaaggtcaagacgcaaagtacctgatacttttttcatcgctttgatttgcgctgagccgccgacacgggatacagacaatccggcattgatcgctggacgtacgcctgagaagaacaaatcagattgcaggaagatctgtccgtcggtgatggaaatgacgttcgtcggaatataagcagagatatctccggcttgtgtttctacgaacggcagagctgtaattgatcctgcgcctttcgcgtcgctaagctttgctgcacgctcaagcagacgggaatgaagatagaatacatccccagggaacgcttcacggcctggcggacggcgaagaagcaaggacagctcacggtaagcggccgcttgtttagaaagatcatcgtatacaacaagaacgtgcttgccgttgtacataaattcttctgccattgtaaccccagcatacggtgccaggtacagaagcggtgccggctgtgaggcagacgccgttacaacaattgtataatcaagcgcgccgtgtttacgcaatgtttctactacgccgcggactgttgattctttttggccgatcgcaacatatacgcagatcatgtcttggtctttttggttcaggatcgcatcgatcgcaacagatgttttacctgtttgacggtcaccgatgatcagctcacgctggccgcggccgattggaatcagtgcatcgatcgctttgataccggtttgaagcggttcatgaacggatttacggtccataacgcctggtgcagggctttcaatcggacgagttttgcttgtaaggatcgggccaagtccgtctaccggttggcctagcgggtttacaatacggccgattaactcttcaccaacaggaacctccatgatgcgacctgttctttttacttcgtctccctcacggatctcactgaaaggtcctaagatgacgatacctacgtttgattcttcaaggttttgagccatacccaaaacaccgtttgaaaattcgacaagttcaccggccatacagttgtcaaggccgtgcacacgtgcaataccgtcaccgacttggatgactgtacctacgtcttgaacttcaatatcagattgataattttgtatttgctgttttatcagcgtgctaatctcttcagctttgatgctcacttaggtttcaccccttctatcgattttccccggctaattgacgttcgatgcgctgaagcttcccgcttacgctgccgtcataaatccggtttccaatgcggactttaatgccgcctattaaatccgtctgcacttcatttctgattctcagtgaagcgactccggctttttttgcaaacacttgtgataatggtaacatttctgcatccgtcagcggtttcactgaatatacgattgcgtcttctgtttgacgggccacatttgcgagtttgataaactcatctgtgagctcagggacaatcgcggcacgatggcggtcaatcaaaagaaaaatcgtattgagtacggactgtgacaaagagccaaatgcattttgaatcagctcttttttcttcgcagccggcaccttcggatggttcaacacatcattaagcgctttttcattttgaaatacttgttttacaacaattagctcttcttctacttgattcagctgagcggactcattggctatatcaaaaagagctgatgcatatcgtttagagacagctgatccactcatcggctttctcctacctctttaagatagtcctggatcaatttctcttgcgcttgttcatccagttctttttcgatcactttcgacgcaatcatgacagaaagagacgctacttgctcacggagagcagaaaccgcctgttccttttccttcacgatttcagttcttgctgcttctttcagacgttcagattctgcacgtgcagcctgaataatctcttctttttgcttctctcccagtttctttgcgttttcgataagagtttgggattcctgtcttgcttcttttaaaagaacgcgctgctcttcaatcagctgctgcgcttctttatttttttcttcagcagacgtaatttctccagcgatgtggtcttcacgctgtttcattatgtttaatagcggccctaaagcgtatttcttcagaagcgctaataagattaacatagctaacagttggaacaggatatctccgccgttaaacgacaatcctagttcaagtggtaattgagacatctactacggcaactcccttctgcaggtttttctttgctgatccagcagccgcacttgtctcttttcagccggcaaggcgggatgcttatcagacataaagcaatggcgaaggttctcttggaatgatcttcgccatttttagttcatataaggcttttatgcttagccaaagaacgctaagaatgcgataacgacagcgataataggaagggcttcaactaatgcgatacccatgaacataagagttctcagttctttacctgcttccggctgacgggcaatcccctctaccgtacgtgaaacaatcaaaccgttaccaatacctgcaccaagtgcgcctaaaccaattgcaatcgcagctgctattaaattcatgaaaaagttcctcctttaaaatgttatccgtttggatataatgttttaatgatcatgactgattttatgagacatgtacaccatcgtcagcattgtaaagataaatgcctggatagcaccaataaataaactgaatgcttgccatgccagcatcggcagaatggcaccgattgtaccgacaagaccgagagccacgctttgcgaataatggcttgttgctaatcccgcaagcaggccgagaagaatctcaccggcgaagatgttaccatacagccgcaaacctagagtcagcgtattcgcaaactcttcgatgattttcatcgggagcatgaatggaacaggtcttaaatagtctttggaatattccttgagccctttcatcttcacaccatagtagtgggttaaagcaacaaccatcacggctagcgttaatgtaatggcaggatcggctgtcggagacttccaccagagctcatgtccgattgtaatagagaacggcagccccagcatattcgacacaaatatgtacatcagcaatgtgacaccaagtgccaagaagttagcccctgtttttaaatccattgtactgccaataatattgcggacgaaatcaacaatccattccataaagttctgggcttttccgggacggatcgaaagcgttcttgtcgtcaatatagcaatcaataaaacaatcacactcgccacagtaatcatcagaatgtttgtcagattaaaagtaagacctagaaattctatagttctgtaaccatgattcaaagggttttcacctctcttccattgatgaacgtttaagctggataaaggaatctatcataatgacagggtatattgtcattaatccaataactgtacttgccatatgaaagtattcgggatttttataggcaacagccacagcaagaatcgcattgcaccaccgcgctgcgctcccgagagatcgtatggactttcctttctcaacagctctgtcaaaagcattcattcttctgacgagcagtaaaaaattaaacaaactgaaaacagttcccagaataaggcctaaaaaaacggttttatacgctgttaaaccataacccagtacatacactgccaaaatgaacaataaatatttgcgttgtctgctaaatgtaagcttgggatcgtccatcaattatctgtctcctgatgaaaaaataatgtatagcttggatacggcaaaaatcagcggttaacccttagtagaagaccttttttgaccggcaaaacgggcctgttcgaaaaaatcattcatccgcaagccttgcagggatgctgtttcattcgcttaaataaatcctcataatacgggtttgctgagaggatttacattgaggatgaggactataatgaaagctatgaaaaccttctcataataccctcgtttagcatacaatagcccctaacatgtgtcaatctgtttaaagttaaaaaactttttatactttacgtctccacagaatgttcacattttcacctataattgtatacagattcaccgaatagcaaaaaactggataaaaaaatgaaacccccttttggggatttcattttttattttgttccaaacatgcgatcacccgcatctccgagacctggaacaatatatcctttttcatttaatttttcatctagcgccgcaatgtaaatatcaacgtccgaatgatgcttctgcaattcttccacaccctccggcgctgctacaagacacatgaaacggatatttttcgcaccgcgttttttaaggctgtgaatggcttcaactgcggaaccgcctgtagcgagcatcgggtcaaccacgatgaattcacgctcttccacatcagaaggaagcttgacatagtattccacgggttttaaggtttctggatcacggtaaaggccgacatgtcccacttttgccgcaggaatcagctttaaaatgccgtcaaccattcccaatcctgctctgaggataggaaccactccgagttttttccctgagatgactttcgatttcgcagcctgaaccggtgtattgatatccacttcttccagaggaagatcgcgggtaatttcaaatgccatgagtgtagccacttcatctactaactctctaaaatccttcgtacctgtattttcattccgtatatatgtcagcttgtgctgaattaaaggatgatcaaatacataaacctttcccatactgtgtttcagctccttttttattgtcccatcaacaattacacacttctattgattctacaaaaaaagacattgagtttcaagaacatcgtcaaaaaacccgccgggcataagccccagcgggttttaggatcttaataatctaattctttatataaaggaaatttatcagtcagagcagctacacgctgtcttgcttcttcaagttttccttcgtcttcgtggtttttcaatgcaagcgcaatgatagcaccgacttcttctaatgcgtctccgtcaaaaccacggctggttacagcagctgtcccaagacggatgccgcttgttacgaaaggtttttcaggatcatatggaatcgcgtttttgttagacgtaataccgatttcatcaagtacatgctccgcaaccttaccagtcagtccgagcgaacgaagatcaacaaggataaggtggttgtctgttccgcctgaaacgagctggatgccctctttcgttaaggcttcagccagacgtttcgcgtttgaaatgacgttttgtgcatatgttttgaaatcgtcctgcaatacttcaccgaatgaaacagcttttgcggcaataacgtgcatcagagggccgccttgaattccagggaagatcgatttatcaattttcttgccaaactcttcacggcaaaggatcataccgcctcgaggaccgcgaagtgttttatgtgttgttgttgtaacgaaatcagcgtaaggaaccgggtttggatgaaggcctgccgcaacaagtcctgcgatatgtgccatatccaccatgaagtaagcgccgacttcatcagcaatttcacggaatttcttaaagtcgattgtacgaggatacgcacttgctcctgctacgataagcttcggtttatgagcgagggctttttcacgcacgtcatcgtaatcaatatattgagtttctttatctacgccgtactcaacaaagttatattgaacaccgctgaagttgactgggcttccgtgtgttaaatggccgccgtgggagaggttcatcccaagtacagtatcgccttgctccaaaatcgtgaagtacactgccatgtttgcttgtgcgcctgaatgaggctgaacgtttacatgctccgctccaaagatttccttcgcgcggtcacgggcgatatcttcaacgacatcgacgtgctcgcatccgccgtagtagcgtttgcccggatatccttctgcgtacttatttgtcaaaacagatccttgtgcttccataactgcttcacttacaaagttctcagaagcaatcaattcgatcttagtctgttggcgttcacgctcatttttaatggcgttaaacacttgttcgtcttgcgcaggtaaatgtttcatcagcgagatcctctcctatccgtatcctgttctttgtttttaccatcactattgtacatggtttttaaggccgatgtaaaagattatttttaaaaaatctaaatttttattggtaaaaacgaatattaataacttaaatttaatttaaagttcggaatttatttcactgtcttaaaataaaagaaaagactggctatgcagtcctttcattcacactcataaaccgcccgcactccgccgattagtttcggccgtgtacgcgccaatgtcacatgagctgaaccgaggctgttttgagagacacgcatagggacagccaccggcttcagatgcatgccgataaacgtatcgcctatatcaattccggcgtcagcctgaatggtttcaacaagaacaggagacttcatctgcttaaacgcataagacgccatcgctccgcccgcttttggaacgggcacggcagaaacggttggaagcctgaacagcttggctgtttctgcttcgacgacaagcgctctgtttaaatgctcgcagcattgaaacgccagatggattcccgttttttcccggagctcagcaagtccgctgtagatgctttcagcgatatctacactgcccgatgtgccgatccggctgccggccacttcgctcgtgctgcatccaaggacgaagagctgatcttgtttcaattccgcttggtcctgaaactcagacagcatcgtcttccacgtttgtttcaactcattcattaaacagcacccctacaggtttttctcttcataatcggagatttttccaatacgcgtttggtgtcttcccccggtaaactcagtagtcagccagatttttgcgatttcccgagccaaaccaggtccgatcacccgttcacccatcgcaaggatgtttgtgtcattatgctccctcgtcgccttcgcgctgaaggtatcgtgcgccagcgcgcagcgaatcccttttactttattagcggaaatgctcatgccgatgcctgtcccgcaaattaaaatgcctctgtcaacttcgccgctaaccactttttcggccaccggaaaagcataatccggataatcgacagagccgctgccgcagtcacagcccatatcaatatattcaatttgcaattcgtccattaactctttgatttcatttcgaatgtgaacgccgccatgatccgatgcaatggctactttcatctgcttttcctcccagcgtgtgtgatgcggcccgcccgctttattgaccgcgcagcctgtccgctctttgattcacaccatatgatgtgcttttcactatattctactccttcacgcaggatttgcaaatgacctgtttgcagattttctgacaacttatctacggtcttttttcagctgttttgccagctgccgaagaagctcttcaagctcatctcgcgtttgtttatagatgtcaattgagccgccgaacggatcgaggacatcaccatggctgcctgtgacatattcttttaacgtaaacactttatcacgataacgtccaaattggctggcaatgatctgtttgtgctgatgggtcatagccagaaccaaatcagccgattccataagttcttcagttaatggagaagacacatgattaagggcaatgtgtttttcaaacaacgcttcgactgcatgaggcgtcgctttcccattaggtgaagcaaacacacctgccgagcggacattgacattcagcccttccatttctgcaattgatttaaaaagcgcctcagccattgggctgcggcacgtatttccagtacagacaaaaataatatccatgtcagtcaccccttatttttctctattatatatgaagaaaaaagaaacggcgacttcgtttcttttattggtatattaaattggcaaaagcagctttaatccaaacacgattaatatgatgcccccgagcgcttcgctgtatgtgccaagccatgactgcacttgttttccgaccagcaggcccagccatgtcaacatcatgctgaacagcccgaacagggtaattgtgaggagcggatgcgagccgtatatccccaagctcaagccgacggaaaagctgtcaaggctgacgccgatggcaaacagcaataagcccggccctgccggtgacatgaatcgttcttctgactgtttaaaagaggccataagcatttgaaccccaagaacaaaaagcagcgccccaccgatataaaccgctaacacgccgaggagccctgacagcatgttaccggccgccatccctgcgagaggcatgatgacgtgaaagaggccgatgatgaaaccaatatagaatatctgcttctttctaagtttgaccatgcccattccaaggccgacagaaaaagcatccatccctaaagcaaacgccatgatgcttaatgtaatcagttcgcctataaacaaatccgacatacataaataacccccttggacacgccccgcttttttagcctatgcgtgtccaaaaagggttagaacatctgactgctttcagcgaatcactcttcctccggcggctttcatcagcctgttcataatagcaagaccgacacctgtatccggaaaggattccgctataatgaaatccaccttattctcatcaaagctgcgcaaagcatcatacagccctgccgcaacagtctcaagctgagcccgtcttccgcagctcttcacataatcagcggaataaacgcccgcgttttcttctgtcgtcaggacaccgacccgtcttccgccctgttgatattcttgaatgaggtgctgaatgcgctctgggctgccttcgcaaatggcaagaggcgctgtcggcgcataatgtgtatatttcatccctggagaaatcggcttctcgttttgatcgctgagccctttatccacatggatcggcccgatcacggcctcaatttgttccttcgtaatgccgcccggacgcaggagaacagggatgtcgtccgcacatgaaagcacagttgattcgaccccgattccggtagggcctccatccataataccggctatgcggccatccaagtcgtgagccacatgctccgcttttgtgggacttggcttgcctgatagattggcgctcggtgctgcaatcggcagtcccgattcgcgaatcaatgcaagggcaagcggatgatccggcattctaatggcaaccgtttcaagacctgccgttacacgaggtgaaagcgcatcaggtttgcaaggcagaatgagcgtaagtgctcccggccaaaaccgtttcatcaatgttttcgccttttccggcgccgggcccgttaaatcctcaagctggctgatatccgcaatgtggacaatcaggggattatcgctcggccgccctttcgcctcatatatttttttgacagcatccgtattttttgcgtttgcgcctaggccatatactgtttctgtcggaaaggcaacgacctcattttctcggagcaaagcggctgcttgtgcaatttgtggatcatttgtggataactcgtcagttacatccacaaaccatcttttcgttttcatttctgaccaaactccttattcacaacaataaaacgattgttttacgcgtgtaatccttttgaaagtataaaagatgtcctgtaataaaacaagcgttatccacaaattgtggacaacgctaataaagaagtggataagtatgtgtataaactgcacttatccagacgcttttttcatcaaaacggccccttctgtttgccgcgattcacagaagtgatcagaagaaaacagctcctccggtacactttcagctctttcaaaacccatggccgtcagaaagtccgcagaggaatgctgattcgctactaggtacacggttttgatctgatgcttttcgcacagcacctccatgctttgaaaaagcgtgacgatgtggccttggtgaagcttgtccgatatgacaagtgatcgcagcagcccctggtcacagctgattttttcaataccgaggcatccggcaatgtttttctcactgtcctccagcataagaaattgagtgaagccttctttcacgccttcatagctggttttcgcctgttttaaaaattcctcgagcacatctccgtctttttcccttgccacccgcagttgataaaacatccgttcaccccgtttttgcgttctttcttccaatctatgaggcaaatctatttttagaccagatgattaggaaaaaaggtcggaaatccattcgactaaaaagaatttcacttctgtgccgtcttctttttcttcattctcttcttttttggctttttccgctttagcggttacgtcctcaagcactttttcagtctgcttttttgaggcttctttatcttcttgttctttgacggcttccccgttagaaaaatcgagaaagcagaggggcgggaacagcacacaccaccagttggcgccgtctccgtttccaagcgtaatcaaaatcgcttcatactcaccggcaggatataccatgttgccgtaaagctttgtcggaaacgagattttgtcaaaatcaacggatatcgactgattcgctccttctttctccattgtttcctttgcaattgctttgatttcaggcagctttgaacgaatcacgcgacgcgcttcttcaatagaagtaatatcctttacccaagttgtgatttctttattcaccgcgtctcttatatgacgttttaattgctggtcttgatcactatcgctgtttgccaatattctcaaacgaatcgcctgatccggtatgaccaccggctgattttccgatttctgtgccgtctcttcttttgccagccctacgagcgctccagataataaaagaaagatatatatacaaatgattactgtttttttcatcggtccccaccgttcctctccgtgctttgtttctagccctattatggacaaggagagccgggggtaaacgtgcagggtgaaaaaaatctagcaagctgttaatcttatttatggtacgatagtgttttaggaggtttaagatgaaatacaattatacagtgctgttatcagcattcacgatgtccgttctttattcagtaatttatattcattcatttatcattgccgctctcatcacaatggcattttattttctgtttccttatttgatcttcgcactgccgcttcaaatcatgatgaataaaaagccgaaacggttcagccctttgtatctgctgtattaccttatcgctgcttttattgccaacgcgatcattttcggcgtgcttcagccttcgggacaatctttgtttcaaaatacagccttttatcttttcgctgtattaacagctcttatctattggatatgggattctgttttactgcaaaaaaaggaagcctaagaggcttccttttttattaaaacaaaatcgtcagcaaataacatagaatggaaggtatcgccgcaacaaagaaagcggccgccattttcatgcgagatgtacggccttctttggtttcagaatggtagtttgcccgctgatcgcttccgcttacagccaaacccgatgtaatgatcgcgagccccactaaaacgagagacgcaacgccaaaaatcgcttcatatgaaagagcctgcggaaaaatggtgccaatcatgctctcaatcgcaatgagcaggattcctgctgtcagggcctttttcatgtttacatcccctttgctggtgttaaacagcttgatccattcactcgccagcaagctgcttatttatttttatgaatcagagcgcatatggttctgtcttttccattaatatctttcagcacttccacttccgcccccttaaacgccttgaggatcaggtctttgaccgccgctccctgtttccagccgatttcaaaaacgacaaatactttatccttcataacaagcggaatgtcttccataaaccgcttataaaatttcagcccgtctccgccatcggtgagtgcgtgcagcggctcatgaaaacggacaatttccgataaatcagccatttcttcctctgaaatatatggcgggtttgagacaatgatatccgctttttttcccgccttaataaaaggctcaagcagatcgccctgataaaagcgcacattcgctccgagtttttctgcattggcagaggcgacttgcagcgcctctttcgaaatatcgaccgccgacacagaaaagctttggttttcaagcgcaagcgtgacggctattgcgccgctccctgtaccaacgtcaacaacttcaagcttgccgtcttcagaaaagacactccgatatttttcaagcaaatgaaagacaacttcttcagtttccggccgcgggatcagcacatcatcattcaccataaattcccgtccataaaaaaactcttttcctataatgtattgaaccggcacgccctctttatgcatctcaacgtgacgcttaaagcgatacagttcgtcttcaccaatcggttcctgtaagcttgcgagcagtttgcttctctccattccggtatcataaagcaataggagctcggcagcattttcttctcttcccgcttcggttaaataagaagaagcccatttcagggcttcgaatatcgtcttcatcttaaccttccgactgctgaagcttgcttgcctgatcttcaacaatcagcgcttcaaccacttcgtcaagttttccttcaagaatctgatcaagcttttgaatcgtcaaaccgattctgtgatccgtcacacggttttgcgggaagttgtatgtgcggatacgttcagagcggtcaccagatccgactgctgatttccgtgtttgatcatattcagcctgggcttcctgctgaaatttatcatagattctggcacggagaaccttcattgctttttctttgttcttaatttgagatttttcatcctggcatgatacaactacacctgtcggcaagtgagtcagacgaaccgcagacattgttgtgttaacgctttgtccgcccggtccgcttgaagcaaacgtatcgacacggatatccttctcatggatgtcaacctctacctcttctgcctcaggaagacatgctactgttgcagtggatgtatggatgcgtccgcctgattctgtttccggaacacgctgtacgcggtgggcgccgttttcatatttgagtttagaatacgcgccgcttcccgtaatcataaagatgatctctttgtagccgcccgttccggttacattcgcttccatgacctctgttttccagccctgaagctcagcataacgggaatacattctgtacaggttgcccgcgaataaagcggcttcctcgcctcccgcagccccgcggatctccataataacgtttttgtcgtcattaggatctttcgggatcaggagcaccttcaggcgttctgacagtgtttccgtttccttctgaagttcagaaatctcttccttcaccatgtcgcgcatctcagcatccagcttctcttcaagcatcgcttttgcatcagccagctgttctgacgcatctctgtattgtctatatacgtcaactgtttcttgtatatcagattgctcttttgaatattctcttagctttttcggatcgttgactacttctggatcgctcaaaagctcatttaatttctcgtatcgttcttcaattgattttaaacggtctaacacggtcttcacctctgttttcctgtgcgtaacattctcattatagtatagtgattaaccccagtcaaaagcatttcaatcccagctttaaaagcctcctctgctatactgggaatcgaggagggatattgttgctgaaatccatacatcatattgcaatcatatgttcagattacgaaaagtcgaaagctttctacgtacataagcttggttttcaggtgattcaagaaacgtaccgcgaagagcgcagctcctataagcttgatttgtcgcttaacggctcgtatgtcattgagctgttctcgtttcccgatccgcccgaacgacaaacccggcctgaagccgcaggcctgcgccacctcgcctttacagtcggtagcttggataaagcggttcaggagcttcatgaaaaaggaatcgaaacagagccaatcagaacagacccgctgaccggcaaacgtttcaccttcttttttgatcctgaccagcttccattagaactgtatgaacaataacagtttttgaagaaaaaaaggagatacccactttctttgccgaatcttttcttgttttgtctaacgggaagggaacctcattctatggtcgaatacctagcttaaaaggaggtatgggatcatgaatacaaatatggtagcaagtgaactcggcgtctccgcaaaaacggtgcagcggtgggtgaagcagctgaatctaccggccgaacgcaatgagctcggacactattcgttcacggcagaagacgtgaaggttctaaaatccgttcaaaaacaaatctctgaaggcacggcgattcaggatattcatctgccgaaaagcgctaaaaagcgcacaggcttccttgtccaaaaaacaaatagcgacacagaacgaagaatcgagcagcttgaacaaaagctggacacccttttacagcaaaggcaggacgaaagtgaattgatggcaagaatgtcggaactggaacgccagctgaaacaaaaagccgatgaaggtgtatcttaccagctgcttcagcaccgcagagaaatcgatgatattcttgcagatctgcaatcactgacctcacaaatgaaagaattcaccgctcagccgatccccgagactgctgctgcttctgaaaaaaccaaaacaagaaaaaaaccgctgctgtcactgttcaaatttcaaacctaaagcaaaaagctccccgtaaagggagctttttttgttacgcagtaagcgcgataatgattggaagtgaaatcaatgacagaatcgcactgaccacaaacgcagttgcagtttcttcttcttgtttctcgaaacgagtcgcaatcatggctgcaacggcagaaccagggaatgcaacaagaaggattgcttttgttgtttggtcagccggaagtccgatagcaagagcaatcaggaacattaatgcaggctgaaccgcaacttttagtaacgcaataccgatagccggcatactgagtttaattttacgaataccaacggtaacaccgacagcaaagagagcaacaccagatgttgtgcttccaagctgatcaagcattttaacacccagctcaggaagagtgaaattgaaaaccagcaccaagatcatactgattaacggagcagctgcaagcggctcacaaagaccatgcaggattgattttcctgtcatcttccagaagctgtcgccactctcttcgtttttcttagaagactcaccaacagtagcgataatgatcgcgagcggatcaagaatcgcgttaaccacgatacctgtgaccgcgatcggaatcgcaacttcattcgctccgaataagcttcccaataccgggatacccataaatgcgaatgtcggctgtgcagagttcaaagaaaatacagatgagttcgttaaatcatacttgaaaataaatctgcaaaccaaaagaatgatgatatagaaaccaacaatcccaataattaaagaaatcattaaaggtacttgtgataaaaattcacttctggaagttgtcaaaataccagcgataaagtgagctggaagtgcgtatttcgttactaacgtacttaccccttttgccgacttggcatcataacttccaaaatgtcctgcaaaccaccccagcacgataacaaagaagatcggcgccaggaggattaagatatctaagatgctcaaaatattctcctccaaatcctatgtccgtatactttagctttacaaaaagctttccctcggacagaaaaatttactcgctaattatttcgcgatgacttttttgtattcaggtgtccacattgcttcaagtaccgcttgtttcacatcttcaggctgacgatttgccacgccgtctttaattgctgcttcagcaacggcaatcgcaacttggatagaaacctcttgaagcttatcaatgcttggaagcaatcctgctccaggtgtttcaagatcaaccatttcagcaatcgcatcagcagttgctgcaaacatagcaggtgtaatgatacgcgcttcagctacaattgaaccaagtccaagaccagggaacgcgaatgcgttgttagattgtccgatttcataagaaacaccgttgtattctacattgtcaaatgggcttcctgttgcaataagcacttttccgtcagtccatttgaacagatcttcaggaacagcttcagcaaggtgagtcgggttagacatcggcatgataaccggacggtctacgtgagatgccatttcttttacaatttcctctgtgaatgcacctgaaacccctgaagtaccaatcaagattgttggtttcgcttgacgaacgacttcatcgaatggaatttgacctttttcatcgcgcttccagtctttcacttcatccgcattgcgaaggtaaggtttttggaaatcaaggatgccttcgatgtcttcagtcagcaagcctctgtaatcaagtgtgtagaaacgtttgttagcttcttcttcagataatccggctagcaccattgtgtcacggatttggtcagcaataccgataccagcagaaccagcaccgaagataacaacacgctgatctttaatagaagcgccggttttcttcatagcggcaagcacacctgcaagtgtaatcgcgccagtaccttgaatatcatcattaaatgtcaggatttcatgattgtattttttcatgatgttgcgtgcatttttgttgccaaggtcttcccagtgaagaagcgctttagggaagaatttcaatgcagcttttacataagcgtcaatgaaagcttcgtagcgttcaccttgaacacgttcatgcttgttaccaatatataaaggatcgtttagaagtttttcgttgttcgtaccgacatcaagcacaaccgggataacacggctagggtcaataccagctgcagcagtgtaaacagctaatttaccgattgcgatattaataccgcctacaccccagtcaccgataccgagaatgctttcagagtcagtagcaacgataagatcaatatcgcctgctgtcgcgtgaaggttttcaaacgctttttcaataccgtcaatgttgtcgattgacaagtagattccttgaggtcttctatattcatggctgtactcctgaatcgcttcaccaactgttggtgtgtacacaacaggaagcatttcgcgaagatggtttttcagcaatttatagaaaagaacttcgttacggtttgcaagatcacttaagtaaacattttgacgaaggcggtcaggctgcgcttggaattgctcgtacgcgcgttgtgcttgttgatcaagagaaagtacagttggcggcagaagcccttctaagccgagttcttgtctttcttctagtgaaaaagcaacgcctttatttaaagtaggaatagataaaacttcttttcctctaagagttgtttctaagtggccttctttcgttttttttatgttattcaagcaaatctccttctttcttgaaatagttaaccaagttaagtaataacccatctaaaatatgaccgatcatgatctttatgcgactttgtgacaattattcgaacaatgtctcaaaactatttacattacgtaagctattgtatgcctgtcaaaatcaaaattcaagggaagaaaattacttaattttttaatatacttatttaaattttttaattgcatattatcagaatataaaaaaaacaccggtgtttttagccggtgcattctatctttatacccatgttttggactattttttagatttacctgggacttcgtgatgatgtctgcatcttgcttcatatgattcagatgcaccaaccaaaatgaccggatcatcgtaagaagcaggtttgccgtcaatgaggcgctgtgttctgctcgccggtgatccgcaaacagaacagacggcttgcagctttgtcacactttccgcaatcgccatgatattcgggacgacaccgaacggctctcccctaaaatccatatcaaggcctgctgctatcacacggtagcctttatcggcaagagatgataaaacctcaacaatttcctgatcaaaaaactgcacttcatcaaccgcaatcacatctgtactttcactgatgtgatcccaaatgtccgcagcagacgaaatggcatagctcgtcatcgatgttccattatgggagacaacagcagcttcgctgtatcggttatcaattacaggcttaaataccctgacttcctgcttggcataagttgctctcttcactcttctgatcagctcttcagatttccccgagaacatgctgccgcaaatcagctcaagccacccgctttgtttcattatgtacataggcttcgctcccctctctctgccagctgtgttttagacaatataaaaaacaggcaagactgctgcttgcctgttgagaaatctattattacttaagaccgtattttttgttaaagcgatcaacacgaccatcagcagaagcgaatttttgacggccagtgtagaatgggtggcattcagagcaaatctcaacgcgtacctcttcttttactgagcctgtttcaaattcatttccgcaagcgcatttaactgttgcttttttgaaattaggatgaattcctgctttcattgtatccatctccttccgccctgaatcccgtgtggaaacagagttattatttcggagcattgtccgaaacgcatatgagaaaattatatcagtgatttacttcttttgcaaatacaatttaccttcttgcagatgatagatttgcctgtttccattcttgattgagaatatcgaaaaattcctggtttgttttggtttttttcatttttctcatgaacttttctgcgaaatcaggtgaatcagacatcgttttgcggatagaccataaacgatcaagatgctctttaggcacaagcagctcttctttgcgcgttcctgaacggcggatatcgatagcagggaagatgcggcgctcggcaagagagcggtcaaggtgaagctccatgttgcctgttcccttgaattcttcataaatgacatcatccatacgtgaacctgtatcgaccagagccgtagcaaggatggttaagctgccgccctcttcgatatttctcgcagccccaaagaagcgtttcggacggtggaacgccgctgggtcaatccccccggaaagcgttcttccacttggcggaatcactaagttgtaggcgcgggcaagacgtgtgatgctgtccatcaggataatgacgtcttttttgtgttccacgagacgcatcgcacgttcaagcacaagctcggccactttgatatggttttccggcacttcatcaaacgttgagctgacgacatccccagctacagagcgctcgatatcggttacttcctcaggtctttcgtcaattaaaagcacgatcagctctgcttcaggctggttcgctgtaatgctgttggcaatttccttcagcaacatcgtttttccggctttcggcggcgcaacaatcaatccgcgctgcccaaatccaaccggcgccatcatgtccataattcttgtagacaagaagttcggctttgtttcaagcaccatttgacgatccggataaagtggcgtaagagccgggaaatgcacacgctcttttgcagattcgggatcatccccatttactgcttcaacgtgcaaaagtccatagtaacgctcattttcttttggcgggcgaaccttgccagatactttgtctccgttccgcaaatcgaaacggcggatttgtgaagctgagatgtaaatgtcttctgagcttggagagtagttgatcggtctcaggaatccgaaaccttcagactggatgatctcgagaacgccttccataaacagcagatcttcctgttctgcattcgctttcagaatggcgaaaatgagttctttttttgtcagtttgctgtaataggagattttataatgtcttgcaagttcataaagctctttcaatttcatattttccaaagaggaaatagatacgtctttcataaaaacaccacgcttttcatagtcaatatcttactctgaacatgtcatctgctgcttttgcacaacatccgccaaagcacattctttttttaacataaaggaacttctatcggtaacacttccacccatgatcggcgcttttgttaaaaggattgtcttaatgagttttgaaggaagcgaggacaaaaacatgagaagatcaatacttatatcgtctgtatgcggtagaaattgaaactttcctagtgcttaaaagaaggtattacgcagtaaaattcgcagcactctttatttttaccttatttcaaaaaattattcaactgaaataaggttttgacacggaattgatagagttgacgcttttctgcaaaagttaaagcgggctcacacccgctttttctgtttgttatggacggattacaagatttggtttctttttcaagctgtgtctgccgtcaacgaaacgaacagtgcccgattttgcacggataactaagctttcagttgtaccgacagagcctttgaattgaactccttttaacagctcgccgtcagtaacccctgtagctgcaaaaatcgcgtcatcacccttcacaaggtcttccatgcgaaggactttgcttaaatcaaggcccattttgtgacagcgagtgatttcttcttcgctttgcggaagaagtttaccaatgatttctccgccgagtgctttcagcgcaacagctgaaagcacaccctcaggagcgccgcctgatccgaacaggatatcaacgcccgtgtggtcgaaagccgtgttgatggcgcctgcgacatcgccgtcattgatcaatttgattctggcgccggcctcacgaagctcggaaatgattttttcgtgtctttcacggtttaaaattgtggcaacgacgtcctcaacgtccttgtttttcgcttttgccaccgctttaaggttgtcaatgacaggtgcttcgatgtcaatgcagcccaccgcttccggaccgactgcgattttttgcatatacatgtcaggagcattcagcagagtgccgtggtctgcgaccgcgatcaccgtcagcgcgttccagccgccgcttgctaagatgtttgtgccttcaagagggtcaactgcgacatccacgcgagggccgtacccgtttccgagtttttccccgatatacagcatcggcgcttcgtccatttccccttcaccgattacaacggtccctttcatcggcactgtatcaaaaacgtctctcattgcacttgttgccgcttcatcagcctcatcttttttcccccggcccatccatcttgctgatgccaatgccgcagcttcggtcacacgtaccaattccattgataaacttctttccatttcaacacgatctcctctcacaagaaaccattatgaattttgaagctgttctatttcttcgtcagtcattctttcccgccaaattgtcgctccaagcccctcaagcttcttctcaaggctgctgtatccgcggtcaatatgctccagtcccgtaatttccgtgacgccatcagccatcagtccggctaccaccaagcaggctccggcacgcagatcactcgccttcacttttgcgccttgaagctcaacaggacctgtgatgatggcagatctgccttctactttcatattggcacccattcgtctcagctcatcaatgtgcttgaatcttgccgagtagatggtgtctgtgacgacactcgtccctttcgcccttgtcaggagcgccgtcatcggctgctgtaaatcagtcggaaaccccgggtatacgagggttttgacgtcaaccggctttaagttcttctgcccgccgacaatgaggagctggtcgtcgcttgtttcgatatgatagcccatttctctcaactttgccgttaacgactctagatgagtgggaatgacgttatcgataatgacttccttgcccattgcagcccctgcaatcataaatgtcccggcttcaattctgtccggaatgatcgtatgcttgcagccgtgcagttccttcacgccgtcgattcgaatcacattggtgcccgcacctttgattttggcgcccatgctggtaagcaatgtcgcgacgtcaatgatctcaggctccttggcagcgttttcgatgatcgttttcccttctgccaaaacagcggcgagcataatgttaatcgttgccccaacgcttacgacatctaaataaatccgtgcgcctctcagcctttcagctcgcaaataaatggcgccttgttcattggttacttcagctccgagtgcttcaaagcctttgatatgctgatcaatcggacggggccctaagtgacagccgccaggcaatccaatgaccgcctgcttgaagcggccgagcatcgcccccattaaataatatgacgcgcgaagcttttttactttcccgttaggaagcggcatgctgatcatcgacgtagggtcaacaaccatttccccattctcaaaatgcacgtggccgccgatttcctttaacaggtcacgcagcgtttcaatatctgaaatctctggaagcccttcaattgtcacctcggaatttgccaaaatggttgcaggtattaacgcaacagcgctgtttttagcgccgctgatatgtactgtaccgtttaacgagtcaccgccggcaatattcaacttttccatgatagtctccttccataagaagatagctgcggagctaaataaaatgtcattttattctgtctctgcaaataaagctcatgtccaaaatctagccaattcgaagagaaagaatacaacacattgtaaaatatcaggaagaaaatagcgaagctttggggggtacaggtttcaaaagatgcacagagacccgccggctcgagagacatcgtcgtcatccggcaaaagcagtacgcatacccttcattccgatatcagcttctgcagcccaatgattccttctctgtaaagcggcgtcagcatctgaagatccgctgtatcaggtcggtgaaatacaaaggccgcggcaaacaggcataaagctgtttgccgcccctttcattatttgttccagtctgccaggaattgttcgattcctttgtctgttaacgggtgtttagtgagcgcatgaatgactttcagcggcattgtgccgatatgagcccctctaagagcagcttctgtcacgtgctgcggatggcggattgacgctgcaatgatttgcgtgtcaaggccgtgaatgtcaaaaatctgtttaacttctgaaatcaggtcaagcccgttgtggccgatgtcatctaaacgtcccaggaatggagatacatatgttgcccccgctctggcagcaagaagcgcctggttggcattgaagatcaatgtaacgtttgttttgatgcctaagtcagtaagtgctcttaccgcttttaaaccgtcagacgtcatcgggattttcaccgtaatgttcggagcgatcttcgccagttcttttccttcctcgatcatttcctcagctttcaaagaaataacctctgcgcttacagaccctttcacgacgtctgtgatctcgcgaagacggtcgtggaatgatacgttagcttcctttgctactaaactaggattcgtcgttacaccggcgagaattcctaattcattcgcttctctaatttcatcgatattggctgtatcaacaaagaataacattttcaaaaagcctccctgattaagaaattttctgaactgtgaatatgattgcgctttctaaagatagacggaaaaccgcctgtcaagctgtcaggcggctataaaaagttccaattgaattaagcttggtttgaagaaccaaattcacgcattttaccgataactgtttctttgatcgcttcacgagctggtccaaggtatttacgtggatcgtactcgtcaggcttagctgccaatgtttcgcgaacagcttttgcagaagaaatttggttttcagtattcacgttgattttagctgtaccaagtgaaattgattttttgatgtcagcagtcggaattccagtaccgccgtgaagaactagcggaagaccagttgattttccgatctcttccatttctttgaagccaaggtttggctcacctttgtaagggccgtgaacagaacctaatgcaggtgcaaggcagtcgatgccagtgcgctcaacaagctcttggcactctttaggatcagcgtagattacgccttcagcgataacgtcatcttcttgtccgcctactgttccaagctcagcttctacagatactccgtggaaatgagcaagctcaacaactttagcagttgttgctacgttttcttcaaatggatggtgagaagcgtcgatcattacagatgtgaaacctgcatgaatcgctttcgcacaagattcaaagcttgaaccatggtctaagtgaatcgcaacaggaactgtcactttgtactcttccataagtgcttttaccatagcaacgactgttttgaagccgcccatgtagcgtcccgcaccttcggaaacaccaaggatcactggagatttttcttcttcagctgcttgtaaaatcgcttgagtaaactcaaggttgtttaagttaaattgtcctacagcgtaccctttttctttagctgtattcaacatttccgtcatagaaactaaaggcatgtcgaatgtcctccttatgtagcctgattgtcttctagcgaaaaaagctttccaccctagcatgacccatatattgctgtcatatgtaaatactcagatcgctttttctccataactaggataccaacttttcgacaaatcggcaacataatgacatgattcatttgtttcttctttttgtcagttagacttcaggggcagatattttttgacggcgtctctgatttcgtcgatgtcaaacggcttggcgaagtgcgtcagagcgcccaattccttcgattcctggatcatgtcgagctctccgtatgccgtcatgataatgacccggatgttttcgtcaatgaccttcatccgttttaagatttcgattccgtccatgccgggaattttcatgtccaaaagcacaaggtcgggccgttcttttgtcacaatgtcaagcgcctgcaggccgttcgcagcctgaaacgtctggtagccttctttattgaacacttcatttagcaaaatacgaatgccgtattgatcatcaacgattaaaattttttcattcatcattttacaccccaatattatgattttcgtcaaaagtaagcagtattgtatgtattctgtttgattttcctatttcctttaattataatagtctactttacgacattttctgagcattttctcttttgttgtatactgatattgtacgttataaaggaggattcacttatgttgaaaatattcacgacgcagttaacaggtattttttcccgcattcaggataaggaatctgacgcgattgaagatggggcgcggctgcttgctcaagcggtgatcagcgggcattccatttatttatacggagcaaatgagctgcagggcgtcttttttgaggccactgaaagcaaagaacccttcccatctgtcaaagcctttccagaaagcgctgaggaagtgacagaaagcgacagggtgctgatgttttgctcagggacgggcacagccgaagaacaggcgctctcaaaagagctttatgaaaaaggtgcgggagtcgtatgcgtatcgcccgcagccaaagacagtgcgggaatagaacagtattgtgatgtgcatattgattctaaactaaaaatgccgcttgttccggatgaagacggcacccgttacgggtttccctctttaatgacagcactgtatgtctatcacgctttatcgtttacactaaaagaaattctgcaagagtatgcataatatcttattgtacatgctggaacttgccggaaacaaataaaaaagacttgcccgcttttgacaaacggcaagtcttttttattacttctgatttgcagcttcgacagacgctccgataaagcctttgaatagaggctgaggtcttgtcggtcttgacttgaactctgggtggaactgagaagccacgaaccaagggtggtctttcagctcgatgatttcaacaaggcgtccatcagggcttgtgcctgagaatacaaagccttgctcttccatttgctgtctgaattcattgttaaactcatagcggtggcggtggcgctcgtacaccacttcatcctgatacacttcaaaggctttcgtgccttcttcaagcttacaagggtaaaggccgagacgaagcgttcccccgagatcctccacatccttttgttcaggaagaagatcaatgatcgggtattgagttgacggatcaatttccgctgagtgggcgccttttaagcccaatacgtttcgtgcgtattcaatagacgccacctgcatgcccaagcaaatgcccaagaacggaatgttgttttcgcgcgcgtattttgtcgcgacgattttaccttcaacaccgcggtctccgaatccgcccggcacaatgatgccgtctgttccgcttgtgagttctgcgatattgttttctgtcacttcttccgcgttgatccatttcacttttacatctgcgtcaaacgcatagcccgcatggcggagagactcgacaacagaaatgtatgcgtcaggaagctcaacgtatttgccgacaaggccgattgtaatcgtttgagacaggttgctgactttgttaacaagctctttccattcggacatttccgcttctttgcatgccaatttcatgtgctcgcaaacaagcttatcaagcccttgtttttgaagctccagcggaatggagtaaaggttgtccgcatcttcacattcaataaccgcttttgtatcgatgtcgcagaatagcgcgattttatctttcatatcttgagaaatcggcatttctgtacgaacgacgatgatgtttggctgaatgcccaagctgcgcaattcttttacgctgtgctgtgtcggttttgtttttaattcgccagcagctttaatgtaaggtacgagcgtacagtggatgtacattacgttttcacggccgatgtcgctcttcatttggcggatcgcttcaaggaatggcagtgattcgatgtctccgacagtaccgccgatttctgtaatgacaacatctgcgtttgtctctttccctgcgcggtaaacacggtctttcaattcgtttgtgatgtgcggaatgacctgtacggttccgccaaggtaatctccgcggcgttcttttttaagaactgttgaatagattttacctgttgtcacgttgctgaatttattcaggttaatgtcgataaaacgctcatagtgaccaaggtccaagtctgtttcagcgccgtcatccgttacgaatacttcaccgtgctggtacgggctcattgttcccgggtcaacgttgatgtatggatcgaatttttgaatcgtcacgttcagtccgcggtttttcagcaaacgccctaatgaagctgctacaataccctttccaagtgaggatacaactcccccggttacaaaaatatatttcgtcatttcgtttgctcctctcttcgctcttagctacatttttaaaatgtactattttataaaaaatcatttagccttttaaatgatttataagaaaaatgaggggtgaaaataagaaagctccctttcaatttcttgaaagggagcataacgtactatgttctctcttcgtttttgaagagcccaaaatacatactacctagttcgactatgaaagtcaagatcgttttgaagatgaaatctgatactatttaatttcctcttcttcatcatcatagtcttcatcatcttcatcaataatatcttcttcgatctcaagatcatcgtcgtcttcatcaagatcttcttcgtcaaaatcgtcggcttcaagatcgagttcttcctcaacttcatccaaatcaaggtcgtcttcgtcgatctcttcaaactcgtcaagatcaagatcttcttcgactgctttcttcgcttttttctttttcgccttgactgtcggctgagtttcttcatcaagctgatcatacggataccagctgcgaagcccccacgtctggtcagaaagcgccaggaagcggccgtcaatgtttaaatctgtataaaattgagcaatgcggtctccaagctcttcttttttcacgccgagcaaagatgcgatttcatttaaaagctcctgaaaaggaactggttttttatgttcttcaaataattcgtgagcgatttcaactaaagccatttcctttagctcttcctgtgaatattgtttgatacccaaggtcggacactccctttctattacttatatgtatctgttttatcaataatgaaagcgattttgtatcgttcttatacaaaccatacctctcattataaacaaaataaaacagaatatgctacccttaacagcgttaatttaaataattttacaagagtgatccgactgagagatgttttccgttaatccgcgagcattctggagatgaccagtctttgaatttcttgagtgccttcatagatttgcgtgatttttgcatcacgcatatagcgttctaccggataatcttttgtatagccgtagccgccgaaaatctgcactgcttcggtcgttaccttcatcgccgtatctccagccatcagtttggacatggcggaagcttttccatatgggaggcccgatgattctaaccacgcagcctgataggtcaatagccttgaagcttctatcattgtcgccatatccgcgagtttaaaagcgacgccctgctgctcggcgatcgattttccgaattgctttcgctcttttgcatattgaagcgccgcatcaagcgctccttgggcgatgcctacggcttgtgcagctatgccgtttctgcctccgtcaagcgtcttcatcgcgattttgaagccttctccttcttctccgagacgctttgatgcgggcactacacaatcttcgaacatgatttccgttgtcggtgaagaacggatgcccagcttcttttctttcttgcctgtaaaaaatccttcaaaatccttttctactataaaagcggtaatgccttttttctttttctcgggatcggtgacggcaaaaacaatgtaaatatcagcaacgccgccgtttgtgataaacactttggaaccatttaacacatagtcatcgccgattcgttcagcagttgttttcatgctgccggcgtcagagccagaccctgcttcggtcaaagcgaatgcgccgattttctctccgagggccagctgtgttaagtactctgtcttctgttcctctgtcccaaaggcaaacagcggccagctgcaaagagagatatgggcggaaagcgtcacaccggtggaggcgcacacttttgacagctcctccaccgcgataacgtaggccaaatagtcacttccgattccgccgtaatcttcaggccacggaattcccgtcagccccagatttgccatttcccgaaacaactcgcgatcgaagcgttcttgttcgtcccgttctgccgctgtcggggccacctcatgcttcgcaaaatcgcgcaccaattttcgtatcatctggtgttcttctgataatgaaaaattcattgcttctcccccattttcagatcagcgcctaaaacggattgagccagaagctcgacgacatcgtacgttttgacttggtcttcggcttccttcgcctttgtgccgtccccaagcatcgtgagacaatacggacagccagaactgatcaccgatgggttgactgcgagcgcttgctctgtcctggcgacgttaatcctgttgcctgtttcttcctccatccacattaatcccccgccggctccgcagcacatgccggtttcccggtttctctccatttcaacaagctgcacgcccggaatggctttcaaaatctctctcggcggatcatagacttcattgtaccggcccaaatagcacgaatcatggaaggtaatcgtctcatgaagcgggtgctgcggtcttaattttccgtttttcacaagctcggccagcacttctgtatgatgataaacctcgccttcaaatccgaaatccggatattcgtttttaaataaattgtatgcatggggatcgatcgtaacgatttttttgacatcatttttttcaaattcagaaatattcttctcagccagctcttggaacaaaaattcatttccgaggcggcgcggcgtgtctcctgaatttttttctttattgccgaggatcgcgaaggacacgcccgcgtgattgagcagcttggcaaaggaaattgcgattttctggcttctgttgtcgtaagaccccatggagcctacccagaaaaggtactcaaattcttttccttcttttttcatttcttttacagtcggaatctcagcatccggcgcctcgtcacgccaattttcacgttccttgcggttgagtccccacggattcccttgccgctcaatacttgtcattgcgcgctgggcgtcactgtccatttttccttctgtcagtacgaggtagcggcggaggtcgatgattttatccacgtgctcattcatgaccgggcattgatcctcacagtttcggcaagtggtgcatgcccaaatttcttcctctgtgatgacgtcgccgatcaagcttggattgtaatcaagcgccgctgcggcttcctgcgatccgctgcccgctgacgaagcagccagctgattgcctctcgtatgccgaaacgctgctgcgggcacccatggggagcgcgaggtgacggcagcgcctttttccgtgagatggtctctgagacgcaaaatcaagtccatcggagaaagcatttttccggtgcctgttgcaggacacatatttgtacagcggccgcactcgacacacgcgtacagatcaagcagctgagaccgtctgaaatcctcaatttttcccgctccgtagctttctttcgtttcgtcggtaaaatcaattttttcaagttttccggcagattccattcgattgaaaaagacgtttgccgggccggcgattaaatgggcatgcttcgactgaggcacgtacactaaaaagctaagcaagaacagaagatggatccaccatgcgatatagaaaatcaccgccgcgcctgttttcccgacaccgctaagcataaacgcaatacctgaggcaattggctcgctccaagaaagcccatgctcatgccaaatcagattcatcccgttcccaagcagaacggtcagcattaatcctccgataaaaatgagaacgagtccggctttgaaaccgcgtttcagcctcacgagcttttcgatataacgtctgtagaatgcccacccaacagcaattaaaatgagaaacgtaacaatttcctgaaaaaaggtgaaggcgggatagaccgggccaagcggcagattccggccgggagccagtcctttgatgataaagtcaattgctccgaactgaaccaatataaatccgtagaaaaacatgacgtgaatgattccgcttttcttgtccttgagcagttttttctgtccgaatacattcacccatatggcgtgaagcctttccttgaaccgttgatcaaattgttctttctggccgagcttgatgtaggccagtctcgttttgaccaagtacacaaacaaatagacaacgtaagcggttacaatcagaaataataatgcatttgcgatgagaaagccgctcattccaattccccctttttactgataaagaccgcgatcccctacccccgaatctgtataagattatctttatgataaataatgaatgagtgttcagtcaataattaaattcctgctgttcgggcacactacctttactacggaaaggagtgccggtatgaaggtatttatcgtgattatgatcattgtcgttattttctttgccttgattctgcttgatatcttcatgggccgtgccggatacagaaaaaaggcgtacgagcctgttttttcaaaaaagaagagtgacatcgaattgatccactgcggcgctgatctcgttgagcggatgatgaatgatattcgccaggccgcctcttctgttcacatgatgttttttattatgaaaaatgatgaggtcagccacaatatgtataccttgctgaaaacaaaagcccaagctggcgtatccgtttatttgcttctggattgggcgggctgccgggcaattaaaaaaacggcgctgcagacgatgaaaaatgccggcgtccatgtccatgtgatgaatcgtccccgttttccttttttcttttttcacatgcaaaaacggaatcaccggaagattacggtgatagacggaaaaatcggttatatcggcgggtttaatatcgccgaagaatatcttggaaagaaagcgaagttcggcaattgggaggattatcatctgcgcatgatcggagaaggcgtacatgatcttcaaacgctttttgcttctgatctaaaacgaaataccggaatcgaactgggttcggatgtttggccaaagcttcagcaagggactatttctcacaagatatatgcgaccgacggttattcccttgaaaacatatacttggccaacattgcccaagcgaagaatcgccttacggtttgcacgccttattacattccatcaaaaccgcttcaagaggcccttattaacgcaagaaaaaacggcgtatccgtgagaatcattgtaccgatgaaatcagaccatccgctggtacgagaagcagcttttacgtattattcggagctcttggatgccggctgccttatttatcgttattatcaagggttttatcatgtaaaagccctcatcatagacgaccatctcagcattatcggaacagccaacttcgataaacgaagcctgttcttaaatgaagaggtgaatgttgaaattgatgacgaagcgtttacaagtgaagtctatgccacaattgaggaggatatgaaaaagtcggagctgctgacgatggaggatttcagcaagcgcacattcaggcagcgcccggcggaatggctcggcagggcattatcttatttcttataaaggagagttcctatgattttcagattcgggttcgtttcaaatgcgatgagcctttgggatgcgtctcccgctaaaacattgacattcgcgcgttattcaaagctttcaaagactgaaagaaaagaagcgcttctgactgtgacaaaagccaatttgcgcaatacgatgagaacccttcactatatcatcggccacggcattcctttgtaccgtttttccagttcgattgtgccgctggctacgcatcccgacgtgatgtgggattttgtaacaccgtttcaaaaagagtttcgggagattggagagcttgttaaaacccatcaactgcgaacaagctttcatccaaatcaattcactctgtttacgagcccgaaggaatccgtcacaaaaaatgcggtaaccgatatggcgtatcactaccgcatgcttgaggccatgggcattgctgatcgctccgttatcaacattcatattggcggcgcttacggaaataaagacaccgccactgcacaatttcatcaaaatataaaacggctgccgcaggagatcaaagagcggatgacacttgaaaatgatgataaaacatatacaacggaagaaacgcttcaggtctgtgagcaggaggatgttccgtttgtctttgactttcatcatttttacgccaatccagacgatcacgccgacctgaatgaagcactgccccgcatgatcaaaacgtgggagcggatcggccttcagccaaaggttcacttgtcttccccaaaatcggagcaagcgatacgcagccacgccgattatgttgacgccaactttttgctgccactgttggaacgctttaggcaatggggaactaatattgatttcatgattgaagcaaagcagaaagacaaggcgcttctccgcttgatggatgaattaagctccatccgcggtgtcaaacgcatcgggggcggtgcgctgcaatggaagtcataaatgtgcaaaaataggtttacgacttgtcagctttgggaacttaggctatataagacaacaatcgatggaggagaaagatcatgaaaaatatcaagtctctgaaagtagccgcacaggcctttactttaagaaatttgattcatctttataaaatgtgccattccggaagccacgaggtttatatttattcaaagaaaacgatgtgcaaaatcaaaagcttaattgagcttgaaacgttccgcatggctcataatgaaaaggaatatctgatcgtagttgaaggaacaaaagcatcacagctcattgaaaaattccaaaatctcatcgagcctgctgagagagaagcgctctaacttacatacaaaaaaggatagacatctgtctatcctttttcttatgctcttacataatggagctgaaccgcttgtccaaattgttttgtcccttttaaccgcagttttgtttcatttgttagttcgtgaaacagcgggatgccgcttcctaaaacgacgggaataacagtgatgatgaattcgtcgatggcatcttctttcataaagtcattcacaagctctgccccgccagctatccagatgtttgagcctttttcctgtttcaaacgggcagtgaaggctctggctccctcattgataaacgtcacatgttcatcttgataactgtcgggcgatcctgtaaaaacatagcaggttttatcctgatacgggaaaaccggtgttagcactttaacgtgctcatatgtgctccgccctaaaatgactgtatcaacagtctgataaaaatcactgtagccgttgtcaccttcaccttcaaattcatccagccaatcgatgcttccatcttcttttgcgatcatcccgtccaatgaaacagcaatgtacagcacagtttttctttccatgttctcctcctatcgatgcaccatttgcccgaattgcgcttgatgcagcctgctgtataggcctccggcttcgatcaggtcttgatgacggccttgttcttcaataccgttgtttgtgacgactacaattctgtccgcgtctttgattgttgccagcctgtgggcgatgacaagcgtcgtgcgcccctcagacaactcttgaagcgccttttggatcgccgcttccgtctctgtatcaagggctgaggtggcttcgtcgagaatcaagatcgacggatttttcaagaacatccttgcaattgacagacgctgtttttgcccgccggaaagcttcacgccgcgttcgccaatcatagtatccaacccatcgggcatgttatggacgagctcttccagatgcgcctgcttcacagcttgccaaatgtcttcttctgatgcgcctagtcggccgtaggcgatattttctctaagcgtgcccgagaataagaaaacgtcctgctgcacgacgccaatctgcccgcgcaacgaagaaagcgtcatgtcttttatactgatgccgtcaatcgtaatgtcgccctccgatgcttcataaaaacgcggaagcagactgcaaagcgttgatttcccagcacctgacggaccgacgaacgccaccgtttcccccgcttgaatggataggttgatgtcattgaggacattgtgatggtcatcatagccaaacgaaacatgtttatagcggatattgcccttcaggccggaaacatctctcgcatcaggtgaatcctgaatgtccggctctgtctccatgagctccatatagcttttgaaacccgcgatccccctcggatacatttcgataatggcattaattttgtcaataggcctgaacagcacatttgtcaggagcacaaacgccacaaattccccgtacgataaggagccgcgaatgacaaaccacgtcccgcacaaaaggacaaacagcgtgacaaaccgggtcagcatatagctgattgacccgtttttcgccatgattttgtaggaagaaagctttgtgacacgaaaacgctggttgttgacggcgaagcgttctttttcaaacgcttcatttccgaacgcctgcacaagccggatgccgccgatgttattttctacacgcgcgctgaagtctccgatatccttgttcagcgtggtaaatgctttggtcatttttttgttgaaataaagcgctagccaaatgacgatcggcataatgataaacgttaataaagcaagctgccagttaataaacagcatcactccgaacgccccgagaatggtcatgaccgcaatgaataagtcttccggaccgtgatgggcgacttcaccgatatacattaaatcgttcgtaagcttcgacatcagcgttcccgtcttgttgttgtcgtaaaatttgaacgagagcttttgcaaatggtcaaaaagcgactttctcatatcagtctcaatattgataccaagcatgtgtccccagtaggtcacgatatactgaagagccgagctgagcgcgtacaccgcaaataacccgattgaggtcgcgatgatcagcccccagtccctgcccggcagcaaggtatcaataaaataattgacaatcaaaggaaaactcagctccattaaacctcccgcgatcgctgagaaaaagtcgagaaagaacaacgttttatatggtttataatatgaaaaaaattgccgcagcaccctatcttcccccaatgtataaataactgataatatttctcaattatactatacacgggctgttttgaaagatcagatttcttttttcttacagaacacctgaaaacaggcgggcaaatgactcttttgtccggtcagccacgcctcttttataaaagccgacagggctgagcttttcactttcctgcatatcctcttcaaaatggacctcaagggttcggatcgcttcggcatccgtgaagaacacattcacttcaaagttgagctgaaagctgcgcatatccatattcgcggtgccgacggaggcgagatcgccatcaatgatcatgactttttgatgcatgaagcctttttggtaggagtacacttcaatgccctcaaggagcagctccgggaaataggacctcgacgcgtattgggtcaaaaagctgtcgttcttctccggcaccataacccttacctctaccccctttgtcgccgctgcttttagcgccgtgcgaatggattcattggggacaaaatagggcgtggcgatccatattgatttctgcgctgaagaaatcatttcataataaaggtcgctcatgctttctttcatgtcagggcctgtcgcgacaatttgataaatgcctcctccttccacgggaaccggggtattgtactcctcttgatcaattagcacttcattggagacgtattcccaatccagcataaagatagcgtggagcgtttgcacaatttccccctcaagccgcaggtgtgtatctctccaaaatccgatgtgcggatctctgctgatatattccttcccaacatttaatccgcccacaaaaccggttttcccatcgatgatcacgattttccggtgatttctgaaattcagcttctggttgaaaaacccgtatttcagcggagaaaacgggacgatgtccacccccgcttgtttcattctcataatatctcttcttgccagcttcatgcttcctgccgcatcgtataaaaacctcacctcgacaccctggcgcgctttctccatcataatatccatcatgccgcgtccgagcatgtcagatttaaacatatagtattcaatatgtatgtaagattccgcttttctcattgctttgaaaatgtccgggaaggtttcttcgccgtttttcagcactttgatgttgcttttcgtattgatattcatatgggcagccctgatggaatatgtaaagaacctctcttgattgtccttcagccctgtcacttcgggcgtttccttcttgtcaaacagcttcctgagcttttccctgttgtacattcgttttgtcttaaacagctttccctttacataaagctgtcccgaaaacagataaaacacgtagccgacgattggaaaaaagacaagaatatggatccatagcagcgtgtgctgcgaggtgcggttttcaagaattaatgaatagatgctgaacaaaataatgcttatatagcaaagcaatcctccgtaaaactcaagcctggaaaccggaaaaaaccaaatgacatatgccccgatgagcatcatatataaaaagaaaaattccagtctccttttcagcatcctgattctctccaatctgattcaattacctctgtattacctcttttttctaatcgataaaccttgtaagtaaataacctctccgccgaaggaggagaggtttagaaaaactaactgtcacggaattcatccgcatcgtttctgcagaaataaagcaagactattggcaacgccgagtgaagtctgatgatacaacatgagcggcaggccgaacccgctcagcactccggcaagcgccgaaaaagaggcggcgctgtgactgcaaatacggtggatagagtgaatttgatgcccactctgatgagagaaaatatataaaacgggatattgatcagaaagatataaggagttagtcaggctgagtcataatctgctgttccgccggtttaaaatgagtaaaatccgttttattcttgatcttatttccaaatacaaacacaacaggattcccggccgcccagccattacctttgcagaaaaaaccccctcctgggggggattttcatgagcgtttccgatatacaacgtagctgcgggtcagatacttgagcggcagactgaacacatgaaccaatcttgtaaacggccacaggataaaaacgacgtatcctatcacaatatgaaacttaaaccatagcgggacactctccatcaaagaggcgtcaggccggaacaaaacgatttccctgaaccagggcccgactgtggtccggtaatcaaatcctttcgaatcaatgttgagaaacgtggccgcaacgcccgacagcatcatgaacagcagcaggagcagcgtaaggatatcggatggcgagctcgttttgcggattcttttgtcaaacagccttctgtacgtcaggatgacaagtccggtacatgccgcaatgcccgccggcaagccagcgccaatcgccattttgtgatacatatgctctgaaatgccaagggaagcatacacgccttccgggatcagaatccccatgacatgcccgccgacaacgcacagcagtccccagtgaaaaagtgtgctgcccgccgcaagttttttcttttctaacatctcgcttgatttcgccgtccagccaaattggtcatgctggtagcggtaaatatggccgccgataaagattgtcaatacaatgtatggcataataccccagaggatctgcccgctcatgcctgaacagccccttcaacgctttcacgtacgccaatgttttcaagcgcggccagcagcacgtgcagcagttcagcgtatatactgtcatttttttcgagacgggatgccagctccctcacattggacagatatttctcaaacacgcttctcgctgcttcaatttctgcagccgcagcaaattccagcatcagcggcagataatcaggcagctctttctctgtcggcaggaaaccggattgctcgtatgtgttttttaaatgcagcaattcaacgccgcgttccctttgctcgcccgagttaaagtaggtgacatacatatttgtttttttcccaaagtcgaacgtatagacatagtgttcaatcagcgcttccggtgaaaagctggctgacgcctcgaaaaagtgcagcagcttctcccggatttgccggttgctgatttcatggataagagccttccaatcgggaatctcggctctccactcttcatccggataagagagaagagaggaaagagcggagaacgtcatttgccggtctgtggtgttcatcttgttacacctcatttatcaaaagttagaaacaggagccggggccgcctgaaaatgataagccgcagctcccttgttcagcatataaatctgaaacttcttctcgatgactgctcggtatcacaaagcggtcatcatatttggcaatcgcaagcagccgatacatatcttcaatttgctgttctgttaagccgacactggagatcagttccggatcgattgatttattcgtctggatcgctctcatatactggcgcatgacagacattttctttaacgttgaccgaatatgatccgtatcaccggctgttaacagctgcgccaaatagtctatcgggattctcatttggtcgatagccggaaaaatatcttccgcggattgccggctgccttttccttcaaagagattcataatcgggctgagcggcggaatgtaccacaccatgggcagcgtgcggtactctggatgaagcggcagcgcaatcttccagtcaatgatcattttatagatcggcgattgctgcgcagcctctatccattcagccggaatgccttgttcttttgccagcttggcaacctcaggatcatttggatcaagaaaaacgtccaattgggaatggtagagatccttttcattttcaacagatgccgcttcctccactttgtccgcgtcatacagcatgacgccgaggtagcggattctgccaacacacgtctcagagcagatggttggcagtcccgcctccaaacgcggaaagcagagtgtgcatttttccgctttgttcgtttgccagttaaaatagacttttttataaggacaggatgagacgcaatatctccatgaacggcatgcgttttgatccacaagcacaatgccgtcctcctcgcgtttgtacatggcgccggatggacaggatgagacgcacgccgggttgatgcagtgctcgcaaatacggggcaaatacatcataaagacctcatcgaattctgttttgatcgattcctccatcttttgtacgttgggatcttcaagtcccgttatgtggccgcccgcgagatcatcctcccagttcggtccccattcgatattcataaaatcccccgttaaggacgatttcgggcgtgctaccggctggtgttttttctgcgggctgttcgttaatgtttcataatcatagttccagggctcatagtaatcatcaatcgacggctgattcggattatagaaaaggcctgcaagccgattggttttcgagcccgatttcagctcgagctttccttttttcaatgtccagccgcctttatatttgtcctggtcctcccattgcttcgggtagccgatgcccggctttgtttctacattattgaagtacatatattccgcaccggaacggtttgtccacgtgtttttgcaggtgacgctgcacgtgtggcagccgatgcatttatccaagttcatgaccataccgatttgcgctttaatcttcaagccaatcgacctccttcagcttgcggatgacgacgttcaggtcgcgctgattccccgttggaccgtaataattaaagccgtagctgagctgggcgtagccaccgatcatctgtgtcggcttgacgtgaatccttgtcgggctgttatgggtgcctccgcggttattcgtcagctttgtgccgggcacgttgatgtggcggtcctgggcatggtgcataaacgccattcctttaggaatccgatgagacaaaacggctctcgcgacaacaacaccgtttcggttaaagcattcaatccaatcgttgtctttgatatccgtgtcctctgcatcatctttattcatccacacggttggcccaccgcggaacagcgtcagcattggcagagaatcaaaatacatgctgtggacagaccatttattatgcggcgtcaaataattgaggacgatttcttttccctcttgatcaggccgcttgctcagaaacgggcgatgctggaggatcggtttgaatgtcgccatcgtttcaccgaattccatcatcagttcatgatcgacataataggattgtctgcctgtcagcgtccgccacgggattaatttttcaacattcgtcgtaaacggcgaatacctgcgccctcctttttcagagccggaaaacgctggagacgtgatcaccgttttcggctgggctgtaatttgttcgaacgtaaagcactcttcctcgcgttcttccgccaggtctttcagcttcaggttcgtgatgttttcaagtgattcccatgctttgacggcgacctttccattcgaagtggatgatagggttaaaaccgcttctgccgcctgctttgcttcacttatatttggacatccctttgccacgctgtctgaggtgatttctcccagtctctttttgagtgattcatattcatcggctattgaccagctcatcccttttgttccgctcggctttaaagcagcgttaggaccgagtgcggtcattttatgaaaaatgtgtttgtaatcccgttcaacgacttggatgttcggcatcgtttttcccggaatggcttcacattcgcccttgctccagtcattgattttgccgaatggctgggccaattcctgcatggtgtcgtggaggagcggcgtcgcaaccacttctttcaccggctccatattgacttcttctgccagatcggaaacggcttttgacagcgccttgaaaatatcccagtctgacttcgattcccacggagctgagatcgccggagcaaatggatgaatgaacggatgcatatctgtgctgctgagatcgtgtttttcataccatgtcgccgccggcagcacgatatcggaatacagcgccgtacccgccattcgaaaatcaagattgattaataagtcgagctttccttccggcgcctgctcccgccatttgatttcttctgggcggatgctgtcgctgtcgtcattcattaaaccgttcgttgtccccagcaaatgcttgagaaaatattcatgcccttttcctgagcttgagatcagatttgcccgccatacaaagagattccttgggaaattcacttcattgtcaggatcttcaatcgcgaatttcagttttttctcttggagctgtgaggccacgtacgcacctacgtcttcaggtgttgctgcccctgctttttcagcttctttatacagatcgatgccattttgattgaaagtcgggtaagacggaagccaccctagccgcgccgccagcacattgtaatcagcgtggtgcttgtagcgggatgacgcagcaatcggtgatgccaaatcactgatcggctggtcctcataacgccactgatctgtcgcaaagtagaaaaatgaagtgccgttttgcagcttgggcacgccctcccagtcctttgcagttgcaatcgtctgccatccttcagcaggtcggagcttttcctgcccgacgtaatgggcccagcctccgccatttacgccttgggcgcctacaagcaaaacaagatttaacactgctcggtagatcgtgtcggagttgaaccagtggttaatgccggctcctacgataatcatagaccggccgtctgtatcgatcgcattttgagcaaactctctggcaatcttaacgacagcttcttttttgattcctgtcatttgttcctgccaggcaggcgtaaacggctcaggatcatcataggagacagcttgttgttcgccgatgccccgatttacgccgtagttagccagtatcaagtcaaacacggtcgtgacgtacgtctcttcaccgttcaggttcatttttttaataggaagatcccgctcgagcactttgtttccgtcatttgaaaaatacgggatgcgcaccgtgccgatttcatcctctattccgagcacagagagacggggttcaatcggttccccggtttcttcatcaatcatgtgcaggttccatttctgctgcccgtcccagcgcgagcccattgtcccttggggtatggcaaatgaacttgtctgttcatcccaaaccgcaggcttccactgatcatgctttgtcttccgcccgatgtccttcgcatgcagaaaccgtcccgctgtgtatacgccattttcttttgacagagtgacgagaaatggaaaatcagtgtattgcttcgcgtactcaataaaacgttcagtttcttggttcacgtaaaattcctgcagaataacgtgacccatcgccatcgcaagcgccccgtcagtcccttggcgaatactcagccagtcatccgcgaactttgaggattccgcaaaatctggactgatcgaaatgaccttagcgcctttatagcgggcctccgccaaaaaatgcgcgtcaggcgttctcgttaacggaacgttggagccccatgtgataatatagccggaattgtaccaatcactgctttccggaacgtccgtctggtcaccccaaatttgcggggatgctggaggaagatccgcataccagtcataaaaactgagcatagggcctccgattaacgacataaaccgggagcctgatgcgtggctgatcatggacatggccggaatcggagaaaaaccgacgtttcggtcaggcccgtatttcatcactgtatacagcagagaggctgaaatcagcttcagcacctccggccattcagcgcgcacaaaaccgcctttccctctcgcctgtttataggacttcgctttttcagggttttcgacgatcgatttccaggcttccaatggattttgatgcgtctgcaatgcctcccgccacaaattgatcagcacaccgcgcacgtatggatatttcacacggagcgggctgtagatataccatgaaaaactggcccccgcgggcagcctctcggttcaaaatcaggcatatccgggcctgttgatggataattcaaattttgcccttcccacgtgacaattccgtttttcacataaatattccagctgcaagaccctgtacagttgacgccgtgggtggagcgaacgactttgtcgtactgccatctgtttctgtatacattctcccaatcgcgatcctcgcgggtagtttggctatgtttatttgaatggtgttcgataggagagaaataattcaatctcctaaacaacggactcattttctttttcttcatgagagttcactccttccgagtcaggtgatgctaagttcactataaacagagacagcgtgttttcttgtgaactatgtcacacactctgcttttttcacaaaatgttcacacaaaggagaaggaaggctgagttcaggcaggacgcttgggtcattagctgcctttcattcaaagatcaaaaaaaaccggctctatttaagaaccgggctcggcgttttcatcctgtgatgtatgcagataccgcaaaaataattgataggaacaaaaaacattttgctgaagcatagccaaaaagttcatttgcagctgcggatgataagacatcattttcttaaatatgtaatatgggatgttgagaatcagaatgtctgaagtggcattgactgagataaagggcgataaataaagcccgcctttttcatcaatcggaaacacatcgcctttttcccacagcgcaacggttttcgacccttcagggagccttgtgtccataaaacggacactgccttttaatacaatataaacagattgagaatgaagaaaagatggagactgatcacatgaaccgcggataaacgtgccgtttttcagcaaggtttcgacaatggatagaggcacttcattaaacataggaagttgtttcagaaataataaatagtcacactgattcataggaaaacctcctgtgctaagctaaggatagctttagtgtagctcgactgagcctgtacagcagtgatgtatttcacagcctgtatgatgaatgtcacttatcaggagggtgaatgcatttataatgaaagaaaaaaggaggatttcgatgaaggcgctgattccgaagcagcacggggcgtgggcgatgctgctgatcccatttttactcggcatggtcaagggaggccccgttatttggcatattccgctcttcctaggctggcttttcctatacttagcggtttatcccgttacgcttgccttaaaaaagaaccaaagcaaaccttatcaaaagtggatgtgttattacggttttcccgcctgctgctttttgatgatctcggtctttcataagccgcctctcatctgggtgggcgtttctttactgccgctgtttctcatacatatgtattttgcccgcagaaaaaaagaacgagccctattgaatgatgttgcaggtgtcttgttcttttgttcgggcgggtttgcgagctgctggctggggatgggaaccctcgacggctgggcttggtttattttcttgcagtctgctttattttttatcgggagttccttttatgtgaaatcggtgattcgtgaaagaaaaaacaggacatttgcatactggtcatggggatatcacctgctgctcccctttttatccgctcttttcggagcaggatgggcgtttctcgcttttatcccgagcagcttgcgggcatggttttttcatggaagggattggcccgtaaaaacgattggcattctggaaatcgtgaatgcctgtttctttcttgccgtcatgtgcctgtttatcacaaggtaaaaaaacaaggacaccgctgtccttgttttttcagtcaatattgcaaatctccagcgggcaattttcacactcaatctcacatcgtaaatagtcccgcttgtgcaaaataatttttccggattcgtctatcgaaataaccccttttttgcggagatctcccagcatacggttgatgctttcccgtgcagccgcacaaaactttgccaaatcctgatttgtcaggacaatgttaatcagaatgccgtcgcttcgctccactccgtagctgtttgataagcggataagggtagaatagagcgccccctttttgccatgaagaagcagatccctgattttggactgaatcttccggaggtgcgtgctcatccatttcatgaactcaaatgtcaaagcgccgttttggattaattctttttccagcttatttttattaatgacgagcacctcgccatcctctagtacttttgcactgagcatataccttggttcttcagtgaaaagtgttaattctccgacgatatcatgcttttggcagattctaagcgtcaggtcttttccgtcagatgtcagcttgccgatttcaatgagtcctgattgaatcagataaagctcttctgcatccattccttcccgaaacaaatacgtgtgtttttccatttttcttttcgtgctgatcgattccagcaattcatacagatcgctggatatatgatcactatcagatggtcgaacagagagaaaattcatgagctcacctcgaagaaagtcacgttgtgtgtttattgtaacgtgaattgatttgtacccatcgagaaaaaactaacaatcttgtgaatgccccagtgttagttgatgctctggctgtttctctccgtgtgtgttttcattctttcctgccaatacatccatatgacaaggacaaaactggctaacgccacctctgaaagcgccataaacccgatcgcgtactggcctgttgcctgaaatacactcgccaatatgagcggaggaaaaaagccgcctaaaccgcccatggcagacacaatcccattggcaatccccgcttgcttcgaaaaatagaaaggaaccagtttaaaaacagtcccatttcctacgcctgagcagacggccacggttaatgatccaaacgtataaaggccgattgtcggcgagaacgataggataatgcctgataatgtaagcccggcaaaaacaaacatcaagatgcggagcgggctcattttatcagccaggaatcctcccgcaggcctgagcagcgtagaaaccgcaataaagccagccgtccgcaagccggcatctgcaggattcagcccaaaatgctccaccagaaagttcggcagatagatagtgaaggcgacaaaggcaccgaacgtaataaaataaaacaggctcagaaaccatagcacatgatttcggtaaacagctttgatttgagtcttaacagaaactttgaccttcttctcatgcctgtcgccaaacaatacgtgcagtaaggcaaagacagacagcaaaatcagatacatttgcacggttgatttccacccgacggcttgagcgataaccggcgctgcaaatgtcgtaacggctgtcccgatatttcctgcaccgtaaatcccattgacgacaccgtgcttttctttcggataatatttcgggagggaggtcaccccaatggaaaacaccgctcccccgatccctaagaaaaagccgcctgcgattaaatcaaacagagaatccgcgatactgatccaaaatacaggaaataaaagcaggatgaaactgaccataaacatgagccgcgcgccaaacctgttcgttaaataccctaaaggaatgcggagaagcgacccgaggatcacaggaatcgccgtcaccaaagaaatctcacccttgcttaaatgaatatctaatgtgatttgggaaatgagtgatgaaatcagcacccaaaccataaaccctgccaccaagcttaatgactgtaacgataattgaatgtgttgacggttgatcatttggcttgcccctttcaatgattcaataatcagtcttatcatacaaaaactcggcaaacaggattgtgaattacatcacacgtttttctcataaaaaaaggacaaagcccgaagactttgtccttttgatcgtgattacattttttccggagccgatacgccgatcagctgaagcgcattgttcagcgtaatttgcgttgccttcattaaagccaggcgcgcgcggctcttctcttcattttcagggtcgatgactttctctgcgttgtagaagctgtgcagagcagaagccagatcataaatatagtttgtgacacggtgcggaattcgtttttccgctgcttccgccactgcctctgggaagccgccgatcgttttcagcagatcgtattctttttctgattgaatatggctgaaatcaagatctgccgccggtttaagtccctgctcttccccttggcgaagcatgctgcaaatacgggcatgcgcgtattgtgcataatacacagggttttcgttagatgttgatacagcaagatctaagtcaaaatccatatgggtgtccgcacttcgcatcgcaaagaagtaacgaacggcatccaagccgacttcttctatcaggtcacgcatcgttacggctttaccggtccgtttgctcattttcattttctcgccgtttttgtaaaggtgaacgagctgaatgatttctacttcaagcgttcctttttcatagcccagcgcttcaattgccgctttcatacgcgggatgtagccgtggtgatcggcgccccaaacgttgatcagcttatcaaagccgcggtcaagcttgtccttatgatacgcgatatcaggaagcaggtacgtgtacgtgccgtccttcttgatcaatacgcggtctttatcatcgccgaacgtcgtggaacggaaccaagtcgcgccgtcttcttcatagacatggcctttttcgcggagcgcttcaagcgccgtgtcgatttttccattttggtacagtgaagtttcggaataccacacatcaaacggcacacggaagttttccaagtccttgcgaagcttgtccagctcgtatttcaggccgtattcacggaaaaacgcgaggcgttcactttcctcttcgttaacgaaacggtcaccgtattcctcagcgagacgctttccgatcgcaatgatatcctcgccgcggtagccatcctccggcatcggtttttccaatccgagcgcttcaaagtaacggacttcaacagaaagcgccagattgttgatttggtttcccgcatcgttaatgtagtattcgcggcttacatcgtaacccgcttttgaaagcacgttgcacaaggaatcgccgacagccgcccctcgcgcatgcccgaggtgaaggtctcccgtcggattcgctgatacgaattctacctgaactcgttcaccgtttccgatgttcgtttccccgtatgcttcccctgcttccagtacagacggaatcagctttgttaaatattgattgttcatatagaaattgataaaacccgggccggcgatatccagtttttcaatcgaagcctttcctttatcaaaatgggcgacaatctcttcagcgatttggcgcggcgctttttttgccactcttgccagctgcatcgccatattcgttgagtagtcgccgtgtgttttatctttcggtgtttctaaaacaacattgggaatctggctttcttcagccagtcccgctttcagaacggccgctttaatttcttctttcagcacgtccttcatttgttccgcaatgttcatgcgtgagttcctccctcatacgtgatcgtcatattatgtaaatgctcctgctcgtctccgacatgcatgtcatatgcgatgctgatacggcctttttcttcatcgagatcagattgaatcgattttgtgcttgttttcagctcaagctcaccaaatgacattttatatttagcaattgtggaagctcccgttacgaaacgctgattcattttgacagcgcctgacctcatgaccaggacttcgccttcgcttactttcacaatcgttttgactttgcctaagtcgtgttcttcataataagatagatacactttattttgttttacatagtaaaatccggtggtgcggaattcgatgacttcttggtttccgtcatcctcgatcacagacttcacatggagtgttatcggtgtctcttgcttcattctgacacgtccttttcatcattccactttgacttgaatagtataatcattcggtttgtaaacttcaactgcttctatcttaccatcattgctcatcagatttgaagataaacctcataaaaagcatttccttatatagaagagaaaatcatatcactaattacctttaggaaatgttacatttttccgaaatctatcatttccttttcacatttttttcaaaatatatgtattgaattagtaatttgatagttttaagataaaagtacaacatagatctgctagaaaaacaaaaaaagggaggattcaattatgaaaaaagctgtcattgtagaaaacaaaggttgtgcaacatgctcgatcggagccgcttgtctagtggacggtcctatccctgattttgaaattgccggtgcaacaggtctattcggtctatgggggtaaggatctcccaaaagggcatagtcattctactatgccctttttaagtaaattacaatttttaactaaaatctacctcttggatatacatacacaaccgtttttcatttgaatcatatgtataggggatggtattttgtttatagagcagatgtttccatttattaatgaaagtgtaagggttcaccagcttcctgagggtggcgtgttagaaatcgactacttgcgcgataatgtctccatttctgactttgagtatttggatctcaacaaaacggcttacgagctttgcatgcgcatggatggccaaaaaacagctgagcagattttagctgagcaatgtgcagtgtatgatgaatcaccggaagaccataaagattggtattacgacatgctcaacatgctccagaacaagcaggttattcagcttggaaaccgggccagccgccatacaatcaccacgagcggaagcaatgaatttccgatgcccctgcacgccacctttgaactgacgcaccgctgtaatttgaaatgcgcccactgttatttggaaagctcacctgaagcgctcggcaccgtgtcgattgagcaattcaaaaaaacggctgatatgctgtttgataacggtgtattgacatgcgaaatcacaggcggagaaatttttgtccatccaaacgccaatgagattcttgactatgtgtgtaaaaagttcaaaaaagtcgctgtcttaacaaacggaacactcatgcgaaaagagagtttggagcttttgaaggcttacaagcaaaaaatcatcgtcggcatttctcttgatagtgtcaattccgaggtccatgactcctttagagggagaaaaggctcttttgcccaaacttgtaaaacgataaaattgttgagtgaccacggtatatttgtcagagtcgccatgtctgtcttcgaaaaaaacatgtgggaaatccacgatatggcccaaaaggttcgggatctcggggcgaaggcgttctcttacaattgggttgacgatttcggaagaggcagggatattgtccatccaacgaaagacgccgagcagcaccgcaagtttatggaatacgagcaaaatgtgattgatgagtttaaagatctgattccgattattccttatgagagaaaacgcgcggcaaattgcggcgctggctggaagtccattgtgatcagcccgttcggcgaagtacgtccttgcgccctctttccaaaggaattttcattgggaaatatttttcatgattcctatgaaagcatctttaactcccctctcgtccataaactgtggcaagcgcaggcgccgcgcttcagtgaacattgcatgaaagacaaatgcccgttcagcggctattgcggaggctgttacttaaaagggctgaactctaacaaatatcaccgaaaaaacatttgctcttgggcgaaaaatgaacaattagaagacgtggtccagcttatttaggagggaaacgatttgtcaccagcacaaagaagaattttactgtatatcctttcatttatctttgtcatcggcgcagtcgtctattttgtcaaaagcgattatctgtttacgctgattttcattgccattgccattctgttcgggatgcgcgcgcggaaggctgactcgcgatgagcattttggatatacacgatgtatccgtttggtatgaacgggacaacgtcatcttagaacaagtagatttacatttagaaaaaggcgccgtttacgggttgcttggggtaaacggcgccggaaaaacgacactgattaatacgctgacaggcgtgaaccgcaatttcagcgggcgctttacactgtgcggaattgaagcggaggccggcatgccgcagaaaacatcagatcagctgaagactcaccgttacttcgccgccgattatccgctgctatttacagaaattacggcgaaggactatgtgtctttcgtccattcgctttatcaaaaggatttttcagagcagcagtttgccagtttggccgaggcctttcatttttcgaaatacatcaacaggagaatttcggagctgtccttggggaacaggcaaaaggttgtattgatgacaggcttattgctgcgcgctcccctatttattttggatgagccgctcgtcggtttggatgtggaatcgatagaggtcttttatcagaaaatgcgcgagtactgtgaagcaggcgggaccattttgttttcttctcatctgctcgatgtcgtgcaaagattttgtgattacgcggctattcttgacaacaaacagatccaaaaggtcattccgattggagaggagaccgatctgcggcgggaatttttcgaggtgatcggccatgaataacataatccccatcatgtctttgctgttcaaacagctttacagccggcaagggaaaaaggacgccatccgcattgccgcaggccttgtcattctggccgtgtttgaaatcgggctgattcgccaggccggcattgatgaatcggtgttgcgcaaaacgtatatcatactcgcgcttctcttaatgaacgcatatatggtgtttctttctgtgacatctcaatggaaggaatcttatatgaaactgagctgcctgctgccgatttcttcacggagcttttggctcgcccagagtgtcgttttgtttgtcgatacctgtttgagaagaactttattcttttttattttaccgctgttcttatttggaaacggaacgctgtcaggggcgcaaacattgttttggctcggcaggttttcgttttttaccgtttactccattattttcggagttgtgctaagcaaccacttcgtcaaaaagaagaacttgatgtttctgctgcatgcggcgatattcgcctgtgtatgtatcagcgccgctttgatgccggccgccacgcttccgctttgcgcggtgcatatgctgtgggcggtgatcattgactttcctgtctttctgcaggcgcctccgcagcagagcaagatgcattcatttatgcggcgatctgaattttcgttttacaaaagagaatggaaccgatttatctcttctaaagcgatgctgttaaattacgcggtaatggcggcgttcagcggcttcttttcgttccagatgatgaataccggcatcttcaatcagcaagtggtttatatcgtgatttccgcgcttttgctcatctgctcgccgatcgcccttttgtattcgattgaaaaaaatgaccggatgctgcttatcacgcttccgatcaagcggaaaacgatgttttgggcgaaatatcgcttttattcaggcctattggcaggcggatttctccttgtcgtgatgattgtgggtttcatcagcggccgtccgatttcagttctcacttttttgcagtgcattgagttgctgctggcgggagcttttatcaggttaactgcggatgaaaaaaggccctccttcagctggcagacggagcagcagctatggagcggtttctcaaaatatcggtcttatctgttttgtcttcccctattcttagccacattagccggcaccgctgtatccttggcggtcattccgatagccggtctggtcatagtctattacctgcaaaaacaggatggtggtttctttgatacaagcaaaagagaacggcttggaagttaacctgctgaagactcatcaattttcaactatttcaatcgccgcgagctttctgaaaccgatcgaaagcgcggcggaacctgaggaagaaacgatttatttttacggcgccgccgcatacctgaaggagcaaattattgacgctttcggttgtgctgccggcagccgtttcatgtactcagcgaatctcttttttgatcagcagctgaaaacctgcgggacccgtttgattcacccattatataacgggaatcttcatgttgacgccctgctgaaaacttttgcagacttgtctttcccttcttctctttcattcgaagcagttgaaaaggccaggaatgagctgctgctgagaatcgaaaagaaattcactgatcctttctcctactcggcggcgcgcttggctgaggaggtcttcggaaacccgatgtacggcacaggcatgtttggccggaaagacaggataaaggcgattcatcctaaacggtttctcgacgcaacggactttatcgttgatttagtgtcccagcaaaaacagctgaacatattgggacaagtacaagcatgtgatgttcggggacatgccccgcaaacgtccgctgtaacgtccgaaagaatacccgtaaaccggcatgtttttgaaacagagacacgcagcgctgcaggtccttccgtcttgacactcggatttgactgcggagagatgaaagatgccagcgattatatcaaaatacagctaatagacggattactgggaaagtacggccattccgctttattcaagcacttcagagagaaggatctggcagtctatcacgttatcacccgttacgatgtcatgaacaatttgctgcttgtttcaatatgtacagatcagcttcatgagatagacattcccccgcgcgttttggaagctgtctcagcttttcatacagatgagcgggaactagaacaggcaaagcagtttttacgcaatgaattgctgctgcaattcgattctcccgaaggtctattggcctatatggggatcctgcgccgcttctcctgcacgaaagaagccttgctggatggcatctcagcggttacatgccgtgatgtattgcaattcatagcgaccatcaattatatcggagctcatgtagtaaggggatgaagagatggaaaagaaagccttttttcaacaactggatgaacgaaccgatatcagatacacagacagcggactaaaaatattcagattgaaattcccccgcgcccacctgcggctgtgcaatgtaaaaatcgattttggaagccgggatgtatgtatacgggcagaatccggtgatacactgcttccgtatggcacagcgcattttttagagcatcttctcttctggcataacggccgcaatctgtacagtgatttttttgcgcatggcgcgcttttaaacgcattcactacctacaccgataccaatttcatgtttacctcattaccggatcggctcagacaaacgatccccatcctgcttgatgctttatggaaccactcatttgacaagaagattgtcgctcaggaaaaagctgtgattacaagcgaaattcaaacagcacaccttaaccatcagctctcatatcattatcagctgatcagcatgctttctccctcctcaccagctgccgttttccccgcaggcagaatcgaagatattgaggcgctggacatcagtgatttacaaaaagcctataaggctgcctaccaagcccatcggatgacgctgtttttgattgggggctcagaaaatacagaaacgcttttgcctcctcacctccagctggaaaaacgtccggattatcatgctgaaagaaaaatcatcccggcatgccctccagccctctcacaaaaaatggtgctgggtgatgaggagcggatggaagatacatggaccggattacagatcggcgcacttcccgggcaaaacgatctgttggcgataaagctttattgggatatcgcggctcgtattctatttcaattagattcaccgttttttcaagagattcagcaaacgtaccgtctggaaatcgatcgcttgtcagccgagacttatatatatgaggatggcggtttcttgatccttcacagtcaagggacccattcttcagcttatatcgatgtggcttcatactatgtcacacagaagaaagaacaggttgccgcctggcttcaatacggcaaggactctttgacagacgcgatcatttatgacagcgattatgtgcgtaaatgcttcgagtgggcagccgagtgtgacaggtgcgattgctcgtttcttgacatgtaccacatcattcaagatatggatgcgcaggttttcttgtctctcattgatgcaatggcatcttctaacaaagcgatcattcacgtttctcagaaagaggcgatcagacaatgaaaaaaagcactgtctttacccttttattgctgcttataggtatggcggcttattccttcggatgggttcaggccgttgccgaagccgccgcccaatatgtacagatgatcaacaatgatgctgttcggctcggactgctggcttgtaccgctgccctcctgatgctgcctgcttttctatatcttcattatgtcacccaatccgtgaaaaacatgacagcagcttttcagaaactcacacagtctcatcaaagctgctgtgactttcagcaacacaacttgtgcagccgatatgcagaagacgtcaaatcgctgcgtgacagctataaaaacgtccgccaaacatacgtgatggctgccgtgttgtgccaagtcatcatattcggctgcatgttcgaaatcgttaaagccgtccctttccgccttcacacgccccctgccctttcaatgggacttgcgatgctactgattctgtatttattgttttgcatgcgaacttatttgcggcagcttttccggcacggcagcctgttcagaaaagtgtttgcgggagcgctggcagcagccgggatttggtggatactcagtttctctataagtgaactgctgtttctgattatcctggctaccattcagcaaatcggatcatttatttataaacgattctcttatcgcagcaccgcttctcttgatctataaaatagctacatcgcaatcgcagacggacccgcgccaaccggaatcaccgtcacggctgtataatcacttgtgcggtacacggtcacagcattgtcgttgggctgtgccgcataaatatactgtttgtccggcgttacggcgaggtcaaaagcgccggggagagacacgtttgcaatgatcctctgtctggccgtattaactacatataagttattaataagaaacggttcactatatggctctagaaaataagctctagtgctatcgagagaaaatacaatcgtcctcagcgtttcaaataaacggctgaagtcccctcccctgcttaatggagacaaactaatctccgttacacctttcggccacagctcaccattcaacacgtacgcaaaatttccagcgtaaggagttgcaattaaactgggaaattcaaatgtatctatgatactttctaccaactgcccagtatttatatcatatttatcaaccgaccaactgcttccattagcggtatagacatactgtccattcggatcaagagcaaagtctaaagcgccgggtatcggaatgacatcaatgaccgattgagaggccgtgttaatcacatatatagatccggcggccatcacgtatgcgaactcatcttttggatcaaattcgatctttctcggccctcctccaacagtaatggtatttatgatggttaatgttttattatcaatcactgagacaaggttggtatttccatggaggacatacgtgaatgctttatcgaaagtaacgcctagattagttggcacgtcagaaaaagggattgtttttacaacagtgtttaaatctgcatcaataaccgaaaccgtgctgtctccagtattggcagtaaacacatacgattgagggtctggtgatggcggtaaaacaagtgtcccggtcaccgtaagcggactgccgtagaaaggcggtacaatgagcagatcttccactgttatttgactgaaatcaggacagcggccagactgtgctgcataataaacaacttgatcaatctcttcggtatgaatcacagaaaccgccccattgccttgtccatattgatttcgcacaggcgacacactgacaagaagcgtaatggtcccttgtactctcacagcatatcgaacaccgatatcttctggttccggcccagtctggattaagcaaggctcactgatacaggacacattgtctgtactccatgtaacagccgctgacgcttcggccgaatcaaccttgaagccctcagggatatctatcggcacttgaaacggcgcttctcggctaatttcctcatcacaaaaacagaaacaattttcctgtaaagcagaaagatcattctttttcatgatttcacgtccttttagaaatgcacaacatgcagcggttaaatcgtaatggcacccggtgaaaccccaagagatatcacagtttcctcagaataatcatctgtgttgtaaacaatgatgctctgctctataaaacgagttgcatacagaaaatcgccattcggggtaaacgcatagtctgttgctgattgcggaagatttccaattacacctgctccattcggactgacagaatataaattgccagtgaagctgtcatgtaaatacacctctgatccactcgtaaacattacatatagcccgtcaggctccagctcttgggtatccctgatcgtaaacgtatttaaatcaataaccgtcaaataattgaataagaattcttgttctaatacatacgcataccgctccgtagaatctgtttctatggatgatacgataagctctcgttcaatcgttcctaagacttcaccggtagataagtccactttttgcactaacccaaaattaagaacataggcgaacaacccattggggtcaattgcaatatcaaaaccttctacaggaatagacctctcaacagtcaacgtatcaattccaatcacataaatggcagtaccggtgaaaacataagcaaactcatgattagggataaatctaatcaatcgaggcggctgatccagcaatatagttgctgtcactgttaatgtgtcataatcgatgacagaaatcacattattgttgggatgtaagacaaacacagcgcttttatctggcgtaatttcaatacctgccggattgtacggaagagcaatcgttgtcacaacagaatgagtgtttgtatcaatcacagaaactgattgatcatttggattcgctgtaaacgcataaacgggttccggctccggtacaagcacaatcgtccccgtcaccgataaaggactgccgtaaaacggcggaacaacaacaaggttctcaatcgtgatgtcactgatatccgggcaatcatccggttcatcggaataatagacgacttgatcgatttctgcattgtgaatgacggaaacagccccgtccccttgtccatattgatttcgcacaggtgagacactgacgagtagcgtaacggttccctgcaggcgcactgcaaattgaacaccgatctcatcaggctctggccccgtttgaattaagcaacggtcactgacacaagaaaggctgtctgcattccacgtcacgtttgcaacagcttcagccggatcaacgacaaatccttcaggtaattcaatcggcgcttgaaacatggcttctcggcttgcttctccctcacaaaaacataagcactcttcttgttctgctcctgctttttctttaaaggaaagcttgttttttctcattccttcacttccttttcagacatacactgctcacgcagatataacagaatatggaagtgtaacgtgtttgcttgtacaaattgctgagggtaaacgcttctttttgaaaatatatctccaaacatgcggtgtaacgaaagaaaaaattgcggtttttttgcgcttctcacaagaatgttgatgataaaatatgacatatatagaattatgaagggagggatttgcaaacgtgacaggtgtcatatcttcttcttccatcggagaaaagattaacgaatggtatatgtacatacgccgatttagcatacccgatgcagaatatttgcgacgagaaatcaagcaagagctggatcaaatggaagaagatcaagaccttcatttgtactattcactgatggagtttcggcacaacctgatgcttgagtaccttgaaccgttagaaaaaatgagaattgaggaacagccgagactgtctgatctgctgcttgagattgataaaaaacaggctcgtttaactggtctgcttgagtactattttaatttcttcagaggcatgtatgagctggatcgccgtgaatatgtattagccattcaattctttaaaaaagctgagagcaagctggtttttgtgaaagataaaatcgataaagctgaattctttttcaaaatgtcagaagtctattattatatgaaacaaacttatgtctccatggactatgcacgtcaagcattcgaaatatacagtgaacagactacatatgatatcagaatgattcaatgccagtccttattcggagccaactttttggatttaaaacaatacgaaaaagcaattgcccattttcaaaaagcctttacacttgcaaaaacagagcagaagccccaattaatgggaagaacactttataacatagcactctgcaagcaaaaccaaaacagttttgaatcagcgatagagtatgtaaaaaaatctattcaagtatttgaaggatctaaaatgctcccttcactgccacaagcttttttcctaattacacaaatttattttaaattaggtaagattgataacgcctgtgaatatcataaaaaaggaaaagagtattctgcagctgcgggagataccgtgtatctaacggagtttgaatttttggaatctttatacttgtctggaccggatgaggaacggatagaaaaatgttttgtttttcttgaaagtaaaatgatgtatgcagatattgaggacttcgcacttgatgttgctaaatattatcatcaacaggaaaattacaaaaaagcatctcattactttttaaaggttgaagaagcaagacagcacattcaagggggggtgaatttatatgaaatggaagtataaattattactcgcttgtttagctgtgagtgctgtatttatcacagtcgaagtatcaaattcatcaacagaacattttgatgttgcgcaacgcgccatgatctaaaccgccgtccatcggcggtttttttgtcccctctttacccaatctcccaattcatgctgtgatttttttcaataatcttgaagagagtggaaatgcagcatgtctctgtaaagtgtgagaacccactttacacagtggaatcgagaaaatgatgtgacggagttcgaaacgtcgagcgcgacagtgttgaacagacagctgagacgatcggcgtaagcccgactagaatcgccaagaccctgtccttcagaggggaaggagatcaggcgattctgattgtggcagccggcgatgccaagattaataacaaaaagttcaggcaaacatttggctttaaagcaagaatgctctctcctaatgaggtactggagcagacaggccatgaaattggaggtgtttgcccatttgggttggctcatgatcttgaggtttatctagatgtatcgctgaaacggttttagactgttttcctcgcatgcggcagcagaaactccgctattgaggagaattatccgaattttctttctcaaaagcatggattgatgtttgtaaagactaggaataaaaaacatccagacatcgtctggatgtttacttatttcacaaacccaagcagcatttcacggatgattttgctggctgtgtttgccgtttgctctgagtggtcatacaccggtgcgacttccactaaatcagcgccctttacgtttacctctgaacgcgcaatttcatggaccgatgcaagcagttctttagacgtgatgccgccggcgtcaaccgttcctgtacccggtgcgtgtgcagggtctaatacgtcaatgtcaattgtgacataaaccggacggcccgccagcttcggaagcacctctttcagcggttcaagcacctcaaattttgagatgtgcatgccgttttccttcgcccattcaaactcttctttcatgccggaacggattccgaatgaatacacattgtgcggtccgatcaattctgccgccttacggatcggcgtggagtgagaaagcggttctccctcataatcaacacgaagatctgtatgtgcgtcaaaatggataatcgcaaggtctgggtatttcttgtacatcgctttaatgacaggccatgacacgaggtgctccccgcccatacccattgggaacttccctttttctaaaatgctgtccacgtactcttcaatcatatccaggcttcgctgcggatttccgaacggcagcggaatgtcgccggcgtcaaagaagttcaagtcagccagatcgcggtctaaatatgggctgtattcctcaaggccgattgacacctcacggattctgcttggaccaaagcgtgagcccgggcgatagctgactgtccagtccatcggcatgccgtaaagaatggcatccgcctcttcccactcgggacggctcgcgataaatacttttcctgaataagcttcatcaaatctcatcgataataccctcgctttcctgtaaaaaagcgcaagattcgctcctgcgccataccttcattatttaatcaggtcactcacaaatttcggcagaacaaatgccgctttatgaatatcttttgtgtaatatttcgtctcaatatcgaagaaacggctgtcttccactgcaagcggatcatattttttcgagccaattgtaaatgtccacaaaccgctcggatatgtcggaatgttcgccgtatacagcttcgtaatcgggaagatttccttcacgtcgcgctgtacatttgtgattaattccggtgtaaaccatgggttgtccgtctgtgcgacaaaaatgccgtcttctttcagcgctttagcgattcctgcgtagaatccttttgtaaacaggtttacagccggtccgactggttcagtcgaatctaccatgattacgtcatattgattttcagattttgcaatgtgcataaatccgtcatctacctgcacgtcaacgcgcggatcatccagtttgcctgcgatagaaggaaggaactttttagagtattcgatcaccttgccgtcaatatctacaagtgtcgcttttttcacgcttgggtgcttcaggatttctctgataacgccgccgtcaccaccgccgactacgagaacgtgctccggatttgggtgcgtgaataatgggacatgcgccaccatttcgtgataaacgaattcgtctttttcagatgtcatcaccatgccgtctaaaaacagcatgttgccgaactcttctgtttccaccatttctaaatgctgaaactccgtttgttctgtatgtaacgttttgttaaccttcatcgtaatgccaaagtttttcgtctgcttctctgtgtaccaaagttcgctcaattgtcatctccctttcgaggctgtattcatttattgtaagcgtcttatcagcttttattctcggttgaaatctcattttcacctaaggaaaaagtatagaggatgccggggaaaaagtaaagatgcgtcctgttctgcgatgtttaaaaacgatctttttttctcataatagtagaaacataaaaaaaggggggaacccgttgtggatgcaatgacaaataaacggctgagactgacgctgaaaaccgttcgcgcctttatctttttaggggcttttgcggccttggcggcagctgccgtgtttatgactgtcattttgatagccaaataccagggcgctccctcggtgcaagtgccgcaatccacgattttgtatgcgagtgacggctcaaagctcggggaaacgaactacggcgaaaagcgctattgggtccccttaaaggacatgaatccgacgatcgtaaaagcgacagtggcgattgaagaccagaatttctacgatcatcacggctttgattataaacgcatggccggcgcggcgcttgctgacctgaaagcatttgccaaggttcagggtgcaagcaccatcacccagcaatatgcgagaaacttataccttgaacacgacaaaacgtggaaacggaaatggaatgaggcgttctacacgatccgtctggaacaaaactattctaaggacgagatattagaaggctatttaaatacgatttactacggacacggcgcctacggcattgaagcagcttcccgcctatatttcggcaagcatgccaaaaacctaaccgatgcggaggcggcgcttttggcaggtatcccgaaaggcccttccggctattcaccgtatgtcaatgagacgaaggccaaggaacgccagaaaacgattgtgcggatgatggaaaagcagcagatgatcagccaaaagaaagcggatgaattgatcaaggaacctctttcctatcagcctttgaataagcaagtttccaagagaaaggctccttatttctacgacaatgcgatgagagagctggagaaaaagctcggcatgacacgggagcaaattgaaacgagcgggttaaacgtctatacaacggtagataaacggatgcagcgcatcgccgaggagaccattaccgaaacggttaacgcgggctctgacattcaagtcgggttttcagccattgatccccgcaccggaaacgttctcgcccttgtcggcggcaggaattatcaaaaaagcccgtttgaccggacgacacaggcgaagcgccagcctgcttcgacgatcaagccgttgctgtactataaagcgattcagagtggatttacgccagtcactttaatgaaaagcgaagaaaccgagtttcaaattgatgcaaagggagaaacctattctccaagcaactataacggatactacgccaacaagccgattacgcttctgcaggcgctggcgctttccgacaatatttacgctgtgaaaacgcatctttttctcggcacgaacaaacttgtaaagacggcaaaggaattcggcattaccgcccatcttcaagcactgccgtctctggcactcggcaccgaacccgtgcgtccgattgagatggtcaacgcctatgccatgctcgcaaatggcggaaagaaaatcgaaccgacttttatttcaagggtaacggacgcagccggccacgtgctgtacgaaaacccgaatcagcataaacaggtgcttgatgaaaaagccgcttttgtcacagcgagtatgatgacaggcatgtttgataccgatttaaatggatatacgtcggttacgggacgaacgatagccaaccgcctgacaagaacgtatgccggaaaatcaggaaccaccagcgcagacagctggatgatcggcttcaatccgaagctggccgcaggtgtttggaccggctatgacaaaaacagcaccatcgactcggtcgaagaaaaaagctatgctaaaaccatttgggcggacttcatggaggacgcgctcaaaggcgaaccggaaaccgcgttcaagccgccaaaaggcgtaaccggtgtgtacattgatccggaaacaggctactcatcaggtcccggctgtgccgctaagcattacacatattttgtgaaagggacagaacccgcaaacgtgtgctacggggcagaacccgcaaaacaaacaaaagaccggcttccatccaaagaaaagcccgcttccgagaaaaagtggtgggacaaatggctggggcgacatcattgaaaataacccggctcctcggaggccgggttattcgtatggttccttcataatcgatggaagaatgttagacaatcgagctgaacaatcagttttgggataaagtggtgaatttctcatttcttcggcgctggctttcatctcccagtcgccgactcatatccccctaaaaatgaaaaaccccgagtcttgtttcggctcgggattttccatgtcctatttctgtatcaccagtttactcaatgtttacgaaaaatatctcaaatactttaaaagttcacagaaaattcataaattaattgttttccggaagcaggcttgtttttaattcatctgatgaacggtcccataggccctgatcatgctttttcagaaattcgcctagtacacgcttcgagctgtcgtccattttatcaacgatgattttccgtttcatggatttatccatcaaattcacatgctcaggcagcgacttgtagcctcttctgatgcttctgtcgaccgtcatttcacaggctgtcacaccagcgtaataaggcccctcttcttttctgtcaatcgttacccacacaagccagtatggttttccgttcggcacttcttctttattcgggagaaatttaattcctttttcaacggtgctgcgggcatgcatggcgccgatgtctacgaacgcttctttttcttctacatcaacgaatacgggagaaatgttatcaaggctgagtgcccctacgccaaaaccgccgtgtccgtctgtcggatcacttttgataatattaaacccgattgattttttctttttttcttccatgaagttctacctcctacaaaagcggttgaaatatcgctgaaaacagctttaaaatcgaatctcttcctgcattgagcatcggccacagcacgtaagatcctagcggtgtcacaaacagcaccaaaaatacgataaagccgtagctctccgcctgcgtcattttggtacgcatgcccggcggaacgagatcttctataattcgatagccatcgagcggaggaagcggcagcagattaaataaaaacaagacaagattcagctgtatccaaatggaaaaaaactgatccagccccgtgctgaacgccgcaagcatttccattccgtacgcatgcatcaacactaacaaaaagaaaccgataaacgcaagaatcaggttactgacgggcccggctatagatacgagcacaccggcaagccggggtttcttaaagaagcggcgattcacgggaatggggcgcgcccacccgaagccggccaccaaaatcaaaatggttccgaacggatcaaggtgtttaatgggattcagcgtcagtcttccttgttttttcgccgtatcgtcaccgaatttgtatgcgacataagcgtgggcaagctcgtgcatcgtaaacgacacaattagcgtgatgacgaggtatggcattaaagataacggataatataaaaaacggtccaagtgagatatccctctttctcaaaatgcaagaatttactttattcagtatactataagaagcctctttttctaaagagaggaaacgagataaaggaggattcagcacccatgccatacgtaactgtcaaaatgctcgaaggccgtacagacgagcaaaaacgcaatcttgtcgagaaagtaacagaagccgtaaaggaaacaaccggtgcttctgaagaaaaaattgttgtctttatagaagaaatgagaaaagaccattatgccgtcgcaggcaaacgcctgagcgatatggaataatctctataaagccggcgcttcgcgcaccggcttttattatccctattgagccagcttcgcaataatcgccaagaacgtctttttctcttcggctgttaaacgttcaaacatgccatcaatcagctgctggcggttttcgatcatttgttcagccgctccccggcccgcttcagaaagcgtaatccatacagtgcggcggtcattgttatttctcgatctctcaataaacccttcctgctctaaatgattcagagctgtggtcgtggcagagggagacagtgtgacctccttcaaaatatcctttatggtgcagctcccatgtctgtatatgatccgcagaataaatcctcttacattattcacgtgtttcggaacggtggcttcatctaattgcttcgtgcttttcaaatattttgtaagtgcgtgatccagcaaatttgcttccagtttgtcatggtccatgtcaatttccccatttcgagatgcattcataacatacgaacgatatgatttacttattattttactgattccgaatagggaaagtcaaaaaagcaaaatgtgaattcacagcttttatcctacatgcctcgattttccacctgtttgacaagcttatctttaaatgtctgaaaaggaacatgttcattctgctgatgtccgaatcggcggacgtttaccgcattctcctgctcctcatgatctccaagcaccagcacgtacgggattttctgcacctgcgattctctgattttatagccgagcttctcattgcgctcatcaatgccggctcttatccctgcctgcttcagctccgcctgcacctttctgcaatagtctaagtgaacgtgcgaaaccggtatgatttgaacctggagcggtgcgagccagactgggaaagccccgccgtaatgctcgatcaaaataccgaagaaacggtcgatcgagccgaaaaccgctctgtggatgacaacgggacgaaccttttcattgtgttcgttgatatatgttaaatcaaatttttccggcatttgaaaatcaagctgaattgtcgcacattggtggctccgtttcagggcatcttttatgtggaaatcaattttcggcccgtaaaacgccccatcaccttcattgatctcataagagaggccaagctcctcaaggacgcgtgctaaggcacgttccgacgcttcccaaaggctgtcatcgcctaatgaatcctccgggcgagtcgaaagctcaactgaatactcgaaaccaaatgtccgatatacctcatcaatcagccgaatcgcttctttgatctcactctcaatctgatcctcccgaacgaaaatatgggcgtcatcctgacagaacgtccgaacgcgaagcattccgtttaaagcgccgctgtattcatggcgatgcacctgtccgaattccgccatgcgaatcggcagatcccgataagaatacaggctgtttttaaagatgagcatgtggccggggcaattcatcggcttcattgcgaatcttgtatcatccacttctgaaaagtacatattgtcgcgataatggtcccaatggcctgactgctcccataaccgctgattcatcataaacggcgtacgcacctcatcgtagccggcatttgtttgcagctcacgcgagaagcgctccagctcattgcggacaatctgccctttcggcaaataaaacggcatccccggcgcttcttcagaaaacataaacagccctaactgtttgccgagcttgcgatggtctcgttttgccgcttcttccagcatatgcaggtgcgcatccaaatcttttttcttttgaaacgcaaccccgtacacccgctgcaggacttcatttttactgtctccgcgccaataagcgcctgatactcttgtcagtttgaacgccttgatcatccctgtagaaggaagatgcggcccgcggcacaggtcaacgaattccccttgctggtacagtgtgatatcctccccgcgcggaatatcctttaaaatctcaagcttgagccgctcgtctttttgtgcaaacagctcttcagcttcttcgtaagaaacctctatacgtttgatttcaaggttctcatttattatgtttttcatttctttttcgatggcccctaagtctcctgatgccaagcttttccccagcttcatgtcatagtagaagccgtctagaatcacaggccctacccccaatgacacttcgccgtacagccgttttactgcttgggccagcacgtgcgctgttgtgtggcgaagcacctgcaagccttcttgtgaatcgagtgtgacaatcgaaagctcagcatcctcctccagcttgaaactgagatcaacaagcttgccgttgacctgacctgcggccgccttcttttgcagactggaactgatagaaccagccgcttctttgattgtgatgcctttcggatattcctggatctgtccgtccggaagctgaatgtgtacatttttactcattttaaaacactccttattcattgttgtatataaaaaaacacacccgtcccgcagatagggacgagtgtgtgattaacccgtggttccacccaagttcccgacaaatactatattgtcggctcggtgctgtaacgcagcatagacggcattggatacttcagttccccaatgctgctccaaggcggtaaatgatattcctaagctgggaagctctcacctttccttccctctctgaaaaccgtaactatcattcgtgtccttttcaacgcatttatgtagttcatataaaaaaacacacccatccctctaaaagggacgaatgtgttgatcatccgtggttccacccaaattcccgatcaattacacatggtgatcggcttaaagatgctgtaacgcagcatgacggtatcagatacttgttttccccgatacggctcaaaggcggtaagctgctttccctgcgttaggaagatctcagctgtccttccctctctggaaaccgtaaaaagcatctcgtgtccttatcagtgcctgttgtttcaataattttttacatcttactatatattcccacaaagtgcaatcagtgatttacattttttctgacgcggcagtcccgttatgggcagccagaaacagccatacaagcaatgcagcgaggctgtatgcagcccccatcatcaaaaatgtaaacccggcaccggcataccaagtggcggacagatgaatgatcaccccggttatcgctacgccgaccaaggctccgatttgccggtttgcatttaacgccgcaccggcgatattcgcatgtctttgcccggcagcctgcatgatcacagttgtcatggcaggaactgtaataccggtacagaggttcataacagacatcaacaccgccagctgccaataaggaaaatccggagaaatcagcacaaacaacagcaatgcaatgatacagctgaccgccattgatacaaacataagctgcccggcttcaaatcgattcgccagacgggcaaacagcagattgccgaacacgaagaccgccatcatcggcagcagctccactccagccataaaggaacttgcccctcctgcttcctgcaaaaaaaggctgagcataaacatgccgccaaaaagggcgaaattcagcaaaaacccgataaattgggcagctgagaagcggccgtttttgtataaggacgccggcaggatgggtgcttttgcagaaatttcccgcagcaaaaacagcacaaatgccaaaatcgctgcagtaaatactacaagaatcactggcgagcgccagcccgctgaaggcccctgtatcaaagcataggaaagaaacccgagagccatcatgccaagcagatgcccgatgatgttcacgcggctgctttttcccggaacgcggctgaggattcggtaagctgaaatgagcgcagcagcccctattggcacattgatcagaaaaatactctgccagcccgccaactctaccagcacgcccccgataaaaggcccaagggctgaagcggcagaaacaagcgcggcccacagcccaaacattctcgcccgcgcccgctcatcagggtaagaggcagccaaaaggctgagtgagcttggcataaacaaagctgcgccaattccctgtataaggcgtccggcaatcagcatctgtccatttatagatgcagcgcataaacaggaggccagaacaaaaacggctagacccaagatatagatcgtcttcgagccgaaacggtcagccaaggctccgcccgccagcagaagcgacgcaaaagtaagaatgtacccgtccacaacccacgttacacctgaaagtgacattgaaagagtgtttttcatatcagccatcgccacattcacaacggtcacatcaagagttgccatgaggaaaccaagtgcgagcacgatcagcacggatatgcctgttgatgatgttgattcttgtatagacccactatttttcattacaattgccctttcacttgcttgattacccaatcatctattttttcaagatcatacaattccccgactctgtccatgacatgctgcaaggattcttctctcataagattggaccatttatcctcgatttcccccatgactgtctccagcacacagtgactttcaccctcaaatacagattgcagcaggcctttcccctgatacatcgaacctctgccttcgaccgcttgataaacatcataaagcgtaatgtcagccaaaggcttcgtcagggtaaaaccgcccttcgtccctggcaaggattctgccaaaccggcttgaactaatgttctcatcagcttcttcaagtaagacggagacacgcgcaatcgctggcttatagcctctgacgtcaaagaagcctgtacaggcagccttgacagtaacagcagcacagaaaccgcctgctccattcctgatttcattttcatcctattcactcccgattcattatggataactattatccataatgaatctcttagcagcttttgtcaataaaaaaagcaaaagaaacgattcatttcttttgcttagtatggttaacaaatctgcttcagttcctctatgtattgaagcgcttcgtcatattcttcatttgtatatttttgcttgcttttgatggtaaagactttttctttcttttcctcatcctcaagcccgtcaaagtaaaggatcgtggaaaccagctctaaaaaccgtgatgaacggctgtttacactgtcgatatagcctttcatatccggcatgtccagatcagcatggtctaaaaatgcggagcctgtctcagtcagcgaataccggtattgaaagtagccgccctttttttccttcacctcatgcagaaatccaaggttgcacagctcttcaatctggagcgtcagttcctccgaatacggtccataaaagtgaaaatcatatttctcatagaaaggaaactgcattttcttggcgatataaatcattttctgcagcttctttcgcccgatgatttctccagaatccgagaacaccttcatcagttttgcatgttctttcaacaaattcccgacatctcctttttccttctttccaatttctatgtcagtcccagcagctgccggattttcattttcgcttccggatgttcagagccgtcacaaatcaagtcctttggatagtacagcttgtggtccgtccgccgtttacctgagatggattccacaatagccgactgcctggacagctctttaatttggccgttttgcgtcaagagatggatcggcagacgctcctcttcctctcccggtcggtaaaaatcgtatggcagatctgatgaagaatcaacgaccaaataatagctcggatcgattcccgcctctttgaacaatgaagtcagctcaaaataagccgacatttcttcattcggattgaattcaacgtattggaacagctggcggttaatgaatctgcggcacaagtcggataaaatcgcgtcttcttcatcctcccaggcctggaagtaatacaaaataatagattcatccagctttacataatcctccagtgtcaatttcccttcaaaaatagaatagaaatgaaccggagcgtgagtgaagacatagccttcatcgtgcagctgcttcgccctgtgaagaatcttcgttaaaatgacctctgcacttctggtcacaggatggaagtagacctgccagtacatttggtaacggctcatgatatagtcttcgacagcgtgcattccgctttctttaatgacgatctgatcctcgcgcggccgcatcacccgaagaatccgctccatatcaaaatggccgtagctgacgcccgtataatatgcgtcgcgctgcaggtaatccatgcggtctgcgtcaatctgactcgaaatcaggctgaccacttgcttgtttttatatgttttggcaatgacttcagcaacatcctgagggaaacccgggctcacctttctgagcacctgattaacctccgtgtctcccaaaatgatacctcttgtaaaatcctcgtggtcaaggtgaaagaccttttcaaatgaatgcgagaacggcccgtgcccgaggtcatgaagcagcgccgcggccaaacagagttcgcgctcactgtcatcccattcagggcggcctttaaagacgtcatcaaccattcttctgacaatttcatagacaccgagagaatggttgaaccggctgtgctcagccccatggaacgtcaaataggtcgttccgagctgcttaattctgcggagacgctgaaattcacgggttccgatcaaatcccatatcagcttgtcccgaacatgaacatagcggtgcaccggatctttaaacactttttcttctgataattttccatttggatacgccatcgtcattccctcttttttttagccgtgtttctattatatcgactctattctttgaaaacatccttgaatttgcccggcgatttgttccatcttcatgaaaaacacatcttgtgaagcaaaaaagcctgacctgagggccgaggctaagaaaaaatatgtttttacttttttattttcttttttactttgtcaatcagctcatcctctgtcggagctgacagcgggcgattgttcacaaaagcaaatgattttttccgtccgggcccgcaataagattggcatcctacctcaacctttgcgtccgggtccacttctttcaaacgcggcagcaatgttttgatattagtggcttggcaatcatcacacactcgaaattcattagccatgacgtacgcttcccttcatttctatgttcatctatgtgaataacctaaaatcacgtttcaaaaaaaatcacatcactcttcattttacaaggattcgactgttcctgcaagccgctccatccttcgtatctcctattctttcagccaatttgtataaatattttccaacctggacattctaataccatgaaaagaaaaatgggagttgagataaatgacaaaacagcgacaagacgcttggtcagaggaaaacgatctgcttttagccgaaacagtgcttcggcatgtgagggagggcagcactcagctgaacgcctttgaagaagtcggcgataaattaaaccggacatccgcagcctgcggattcagatggaacgcagtggtccgccatcaatatgaaaaagcgcttcagcttgcgaagaaacaacgaaaacagcggatgagagcgctcggaaacgggcagcccgcgaaaaaaagattattatatcagcctcctgccgttgatcctgaaatcattcaagaaaccgctgcagaagagccggttaaaacggaaacaccttctgtcgaaaatgagcaacctttaatgtctggcgaacatatgccttttgttgatgaaagctttaaggaagagttagctagtctatcacacttattgtctcctcaaacgcctgcagctgcgcctgagatgacgatgaatgatgtgatccgcttcctgcagaattacaaaggcaataacgagcaatcatcagcattaaaaatggaaaacgagcgtttaaagaaagaaaatcaggaattgcaaaacaaaacagagcagctagaggcagaagttcaaaagcttgaaaaagaccaaaaaacgatccaagaagattatgaaaccttggtgaaaattatgaacagagccagaaagctagttttatttgaagaagatgaacatgcctctccgtccttcaaaatggaccggaacggcaatttagaaaaattagcggaatgacatagaaaaatcccaaaacgggcagctgttttgggattttcgccatgtgcaaaatccccttttctattgagaaaagagaatttcctcattttgcagccggatcagctattcttgtaaaatgaggccaagcttatgtgaatctattaagacatgtgagctgcctcggccgttttttgtttccgaggcgcagcagaaatgaccaaaagccccagcatcataagcgcaatgcccagccacgaggaaggcgaaagcatttcccctatgaaaaacacgccaagcaatgaagccgtcagcggttcagctaaagacagcgtgaccgccgccgaggccggaaccccggtaagccctttcgcaaacaaaaagtatgcggcacatgttgcaattaacccgatgtaaaggcttgttcccagtcctctaggggtcaatatccacgagatatctaactgccataatagcggcgtcagcaagatggcgctgatcatgaatacaacggcggaggtcgctcgcggaggctgggttttcatcatcgctttactgatgagcgtatagcctgcaaaagaagcacccgctccaagcgccataagaacaccagccacatcaatccgaacattggaactgtcggaaaacagaagccagcaacccgctaaagccagcacagtcgcaatccaccaagagtttcgcgggcgtttcttcaatacagcccattcgagggtcccggcaatgataggcgcactgccgatggcaatcacagttcccactgcaattcccgtttctttaaccgctgtgaaaaacagcggctggtaacacgccatacaaacagcggctaaaaatacgagcggccatgaccaatttttcacgtgaagctcccggctgatccaaaccgcaagcagcatggcgcttcctcctattaataacctgaacgctccaaatgccagcggtgtggcgctttctggagccaacgcctgaacggttcccgtagttccccagaaaaaagccgccatcaatacaaaaaggctgtaaatattccccttcatctgcctctcccctttaatatggatgctgatgtcattttatcgtttttctttttgtcgtggttatctgtatgtaagaaggatttatctgaaaataagattgtggggtaaaatgctgcttgaaataaaaaatgtatgccggcatatacagccggcatgcgaagaacgttcacccaaatacctttgcattccgctcagccatccggacgaggtttttctcaaattccatttcctcatcaatggacagtccagctgaataaagatgggtgcttaacgcttttaattccgtcaataaagcgaacattaagtcttgtacggagatgtctttttgcagaagctcacttaaggacgccatcgtttccggacgtatttccggatagacgccttttttatcgttttgcttgtctttcagcgccgcttgatagaatcgtctgatcaagtcggccctttcactgccgcttttatctgcacagagataaatttgaacagcgactccgccgcgaacgcgtctctgagagatgccggcgaactttttgccatttatactgaggtcatagctgccgggacaataagacccttcaatttcataggcttcgatctttgcgttgtacggtctcagcattcgtctcatcagctcgaccatcgcttcatatcctttgtctatatcgatgcctttcttttcgtcctcgaatatgagagagatatttaaaacaccgtcatccaatacgacggcaagaccgccggaattgcgtacgatcacacggtatccttcgctctccagcaaggagataccatcctgcaaaaacgggaggcgtgtatcctgtattccaaggacaattgtatcgtggtgcacccatgagcgcgctgtcgccggcgacacgccttttccgacggacatgcatagcgtatcatccattgcgaaggattgcttcgcatcaaataaagggccgagactggattggtcaatgactctccatttcggctgcatcagtaaatcaatcggttggtttgccatctatgtaaaaccctttcatgttaggcttattgaacgaaaactattatatcatttcagcagctgtgattgataattgcttttcagcatcgtaataaaaatttctttattttttgtattctccatgagaggagaatgaatgtaagacagcttgcgctttaacgagaaattattaatatgcagaattgaaatttcgcggtggatcaaatccttacgcagcacgcttctggatagaaccgaaagtcccatgccgttaatcaccgcttcctttacaccttgattgctgctgatggtaaacattgatttcggccgaagtccatttgaactgagtacatgatcgagatattctctcgtcccggagcctttctctcttgtcacccacgcttcgttctgcaaatcgctgatcgaaatctctttccgcccggcgagcggatgctgatttggagcggcaatgcacatttcatcctccatgaacggttcaatttccagctcattctcgtttgtatgtccttcaatcagcccgatatcagcctgaagcatacgcacacgctcgctgacctcctctgtattgccaatcatgacatcgaggttcagctctggatacagcttttgcagctgggccaatagcggcggaagaatatactcaccaattgtaaagcttgcagctattttcaattcgcccttcacatagtgatgatgcgcatagatttcagccttggcttgttcgtagagaaacaccatttgctttgctctttgatataaaatgtctcctgtcggcgttgtcgtaaagtgttttggcgacctgttcagaagagccgtttgaaattctttctcaagatttttgatatgcagactgacgctgggctgggagatcatcagcttttctgccgcttttgtgaagtttttttcttctaccaccgctataaacgttttcagcacgtcgtaatacaaaaaccccacccctgtcattaatgaaatatatggttatgattagttttctttattgtactcatatcatccgtcttggtaaagaaggctatacagaagcgcaaaaaaggcagccctcggtcgagagctgccatcgtcttcatttttattacagtgcttgcgccgctgtaattaatgcgagattgtaaacatcttcagcgttacatcctcttgaaaggtcgtttacaggcatatttaaaccttgcaggattggtcctacagcttcaaagttgcccaaacgctgagcgattttatagccgatgtttcctgcttcaaggcttgggaatacgaatacgttagcgtcccctttgatctcggaatccggcgcttttttctcagctacagatggaacaaatgcagcatcgaattggaattcgccgtcaagtgtcagttcaggcgctttttctttcgcgattttcactgcatccgctactttttctgtttcatcagattttgctgagccttttgtagagaagctgagcattgccacgcgaggctcaatgtcgaacatttttgccgtattggcactttcgatcgcaatctcggcaaggtcttggctgtcaggcgcaatgttgatcgcgcaatctgcgaatacgtattgctcttccccgcgagccatgatgaacacgcctgaagtctttttcacgccttcttttgttttgatgatttgaagagccgggcgtacagtgtcagctgtcgagtgagcagctccgcttacaagtccgtctgcaaggcctttatacaccagcattgtaccgaagtagttctcgtctaataacgctttgcgagcctgttcttctgtcgctttgcctttgcggcgttctacaaatgcttgtacaaggtcttccatgccttcatatgtatgaggatcataaatcttaacgccgtccagcgtaaggttcaattcttttgcttttgcttggatctcattttcattgccgatcacaatcggattcagcactttgtttcctgcaagcttgctgaccgcttctaaaatacgctcgtctaagccttcaggaaatacaattttaacgtcttttccagctactttttcttgcactgttgaaaataaatctgccacaataaaacctcctcaaaaagttacaaaaacgctttcttttactagcatactcttcttccaatcaaattcaaacagccaactttcattatagcgctttcataaaaaaatcttatttttctaactaatttaagtgactcaatcttcccttataggttcttctattttgatggagttatacggaagggatgttcaaggtttctccacagtagaatcggataaactatggtatagtgaaggcaatcatgaaaagataatgggagtgaagataaatgagtgaacagcaaatgacgaatgaagctgcaaaaacgcttgacggctggtatgcgcttcatgatttccgcacaatggattggacttcctggaagctgctgtccagtgatgagcgccaatctatcatacatgaattcaccgggttgcttgaaaaatggggcgtagcccaaaaagaaggaaaaggatcgcaaactctttacagcatcgtcggccaaaaagctgattttatgctgatgatccttcgtcctacaatggaagaattaaatcaaattgagcttgaattcaacaaatcaagacttgctgagttcaccattccggcatactcctacgtatcagtggtagagctgagcaactacttggcaagcggtgacggcgatccttatgaaaatccgcatgtgcgcgctcgcctttaccctgaactgccggaatcaaaatatgtatgcttctatccaatggataaaagaagatccggcaatgacaactggtatatgctttcaatggaagaacgcagaaacttgatgagaagccacggtttaatcggccgcagctatgcgggcaaagtcaaacagatcatcaccggctctgtcggctttgacgattacgagtggggcgttacattatttagcgatgatgtccttcaattcaagaagctagtgtacgaaatgcgttttgacgaagtcagcgctcgctatggcgaatttggttcattctttgtcggcaatcacctttcgcttgatacacttcctcaattcctatatgtataatatcccctcccgccctatccggcgggagtttttcaatcctcctttatcagaatttaaataaaatttgctattttcttcgttttttcttacgatgtagataataatccaattttttcaaaggggtgcagttatttgtcaaaacgaaccgcatttgttatgggagccagtcaagggatcgggaaagcaatcgctctgaaattagcagaccagcatttttccctcgtcattaattcgcgaaatttggataatattgaatctgtcaaagaagacattttggccaagcatcctgaggcgagcgtcattgtccttgcgggcgatatgtctgaccagcatacgagagcgggcatttttcaggaaatcgaatctcaatgcggacggcttgatgttctgattaataatatcccgggcggcgcgcctgatacatttgataactgcaatatagacgatatgacggccacgttcactcaaaagaccgttgcctatattgacgctatcaagcgtgcttcctcactgatgaaacaaaacgagtttggcagaatcatcaacattgtcggaaatctatggaaagaacccggcgccaacatgttcacaaacagtatgatgaatgccgctttaattaacgccagtaaaaatatttccatccagcttgctcctcacaacattactgtcaactgtctgaatcctggttttatcgctacagaccgttatcatcaatttgtggaaaatgtgatgaaaaagaacagcatatccaaacagaaagcagaggaacagattgcttccgggattccgatgaaacgggtcggatcagccgaagaaaccgcagcgctcgccgcgtttcttgcctctgaggaagcctcctacatcacgggacagcaaatttccgctgatggcggcagcatgaaaagcatataaaaacatcccgctttttagcgggatgtttcttgtaatgacccgaacggcaggttcagcttttgaatccgcgtgacaaattcccgcagatcctcctgcttcgacaccattgagattctgacatgcctttttccgttgcttccaaaaatttcgcccggtgtgactacgacatgggcatgctccagcaagtaatcggaaaattggtgagatgtctcaaacgtattcggaatttcagcccatacgtaaaaggttccttttggcttttccatcttccagcccaattccttttcgcaaagcgccgtaaaaaagtcaattcgttccttataaattcgtttcaacgattccgtatgctccggatctccagaaagcgccgcactcgctgcctgctgcagcccgccgaacatgccgacaaatacatgatcctgaaattcattgacggcctgaatgatcttttcgttcccaaccgcaaacgccattctccagccggccatgttaaatgtttttgaaaatgaataaagctctgctccgacaattttggcatcctctgcctcaagaaaactggccggtttttgatcgaattcaaacgctccgtatgcaaaatcatgaatcaaatggatgttatgctctttcgcaaaagcagcagctcttgcataaaaagccgcatcagccacagctccagtggggttgttcgggtagtttaaaaacataagcttcgctttttccagcacggctggatcaatcttttcaaaatccggcagatagccattttcttcatacagcggcatttcgtaaagctcagctcgcgccatcgtaatccctgataaatattcaggatagcctggattcgggactaaagcgatgtctcccggattgagcaggcattgtgtcagcacatacaatccggctttcccgcctccgaaaagcgcgacttccgtttcaggattgattgtcactccgtattcccttttatagaaagcagcgatcgcttcctttaaaaaaggatagcccctgaaagggccgtatccatgaaacgaaggattcagagaagcctcccgcaaagcctccacaatatgcggcggagtgggaaggtcagggttcccctgtccgagattaatgatatgggcccccgttttttccaattcctttaccttttgaaaaacgagagaaaactcctgccttggaagtgtcttgatgacatcggacggtgttatttccatctaaaagactcctttttgctccgttttgttatcccgttccaaaaacgatttgttgacgagcttcgtatgcagaaacaaaccgcatacgatcacgacaatcagccccataatgaccggagcgcttaggatgttaatgaacattgaaccaatagaaatgcataatccgatagacgcttcggccactgaaaaaatgcgcccttgaatctggtttgccgcattttcctgaaccttcacttttgcaagcacttccccgtattccatcgcgatgaaaaagaggatcgccgcgatgacagaaacagcgaaaatcggcgtgaataaaaacagcgccagtgagacaatggataaaacggtaaagtacgtcaggcctctattgttgttaaagccccatttgctgacaagcaccgctccgataaagccgccgaagccgatgcagaacgtgagaataaagttgccgatttccccgtcacccagaaagcggctgacaatcggaaaatagctgtacacaactccccacagcaaagccattgtaatcatcgtaaacatggcgtttaatacgaatgcattggttttgatttccttgagtccttccttaaaagactgaaaggcctctttaatgttttcagattgaatcggcacaaattgcagcttgatacggctgataaaaaatgccgaaaccaggtatgtcaaaccgttaaaggcaacagccagctctacagatccacctaacagaaagagccctccggcagccgccccgacgataatggagatggttgtcgcttttgcaaataacgtgttgatgcttttaatatctgattccaaggacgacatgacagcgagacgggcgggattaaaaaacacgccgcttccataagaaataaacagcagggccagaaaaatcagcggatactcgccttttggaagaaatgtgagccccaaaaagatgatgcctctgatgatatccgtccacagcatgatcttaattctgtctaaccggtcgaccagaacccccaaaaacggctgaaacaccatcggaatgcttctgaccacgatgaccccggacgtcacccaataatcgtgataatatgtagacaaaatgagcagggcagggagaacacaatagtctcccatgaacgatagcgcctgcccgtaaagcaagtatttagagttgggtttcagctgtttcatactggcagcacatactttgccgtcagctttgcatgctgctgaatttgtctgattgattcagccacatcctgtgaattactgcctttcagttcaaatgcagcaatggaattgaaagcttcaaacaatgtcaaatcaattgaagtgcctggtgctgcggccgaaaaagaaacgatttcagtatccccttttaaaagcccgtccggaatatcgatcgcttcaatgaccaaatcctcagcggtttctggaatctggccattttgtttgaaatgctgcgggtacaaatggcagtcggcgacatagtaaggctcttgatccaataatccgtccggcagatcggcatcttttccgaaacagaggacatctaataataattgcgccatatcaaggccgaaaacctttttaatgttagggatcatattccagccggcaaatctggctgccgattcaattaaacccggttctctgtttttcattagcttgacctctgtatgtgttgcgcaattttgcaggccaagcccttcatttgcctttttggcagcttcgacaattttcttttttgcctcttcatccagaatggacggcgtaatgtgggatgtctctgtaaacccgatttgcggcgttttatcatgaatggcgatcgggaaatactcaccgtcagccatgatgccttctatactgatatagtcggagtacccttctgtttgataccagtctccgtactcaccctgtaaaaattcttcagcgataaacggcgcttcaaacgtaaccgcctttggcacgttaattgatttcagatagtcattgactctgttaaattcatcttctgccgtctcagtgtccgtaatcagcgttacaccgatagaactcgctaagtatgtaggctttaagataagaggtgtgccgatctcttcaagagcagcacggaaatcttcaagagttgtgactcgtttgtttttgatcgatttgactccggccttattaaaagcgtccctcattttatttttatctctggcattttcggctgcctgcacgccggcacctctcaagcccagacgttcacaggctttcgccatcggagcaatgaataattcattgtttgttgtgatggcatccgccccaaacatttcggcaaccttgacgatttgctcgacgacctcttcctcaggcttgttatgatcctcatgcgcccaataaatggagtcaggatgctcaaaatcagctaaactcttaaaatagtctttatcttttacgaccgcgaccgagtatttttcaatcaatgctgcatgggaggctgtaattgcaaaaggtcttggaataaagctgaccaggttatatttttcagcagcgcttttataaaacatgtgcggcgggcagcctccaagatcagcgatgaccaatactgtttttctctccatatgtaaaacactccttctctattgtgcggtgtatcctccgtctgcggtgatggcgcttccggtcatatagcttgataaatccgaggctaaaaacagcatcacgtttgcgatttcttcaggtttcccaagcctcagcagcggatttaccttcgccttttcttttttgatctcttcaagtgtgccttcattattttcaaggaatgatttttcattcagcggtgtgtcgatgatccccgggcatacgcagttcacgcgaatgtgatgcttcgcataatcaacggccattgatttagtcagctgcaaaaccccgcctttgctggcgttataagcaggaatatcaggccatgccacgagtccgccgacagagcacgtattaatgatgttgcccttgccggcggccagcatatgcttgagtgcatgtttgctcattaaaaacatgccggtcaaattgacttgcagcaccttgttccaatcgctgagctccatctcgtgaataggcgccacgatttcgatgcctgcattattaatcaagacatcgagcccgccaaatgtatgaaccgccgattcaactgcgtgctggcaggcagcttcgtctgtgatgtccgtttgcacaaagtgcagcctgtcattattttcttttcgtaccattgcttctccctgcgcttcatcaatatccgccacaaccacattggcctgctggcccaaaaaagcctgaaccgcagcataaccaatgcctgatgcgcctccagttataaggacggttttatcggtgaggttcatgatcattcatccgccttcattttttttgcttttgctctgttgtagcgcggcgggaagaagatattaatcgattttgattctttttccgaacggttgatggcaccgtgatcttcacgaggctcacagaaataggctgtgccgaatttcatctcgactgtgcagccttcgaccgtcatgtcatagccgccgccgatgcagatgcctatttgttcattccgatgtttatggaaaggcatttctccgccatttccagggattttggcaagcataatttctacccaatcctcaacaaagaacgtgacttccatgcccggcagcaggtctcttgttttgaaaatatccaaaaagtagtcctcaggacttgtatatgtttcatcagctttcagccgcttgatatcaatagcaatcacttcttggtctgtgtcgtttcttgccccatgtggcacatgcggcggcgcgatataggcagattccaaggctgtcatttttcttgtcacatctccgacagtcatcatcagctcgccagaaacgaccatgccgatttggacctccttatgctgatggggttcaacattggtatgcggcgggacgtaagacattaatacttcagtatcccctcgtacggttgaatactgcctcactccgttttcccattcaattaatttcggtgtcgggaaataaagctcctgcatatcttctttagttttcatcatcaacgtctccttttccaaataatgaccagctcattggaatgcttttgaatgtttttacaaaggttagcccgtacttttgccgtgcaagctcattggttaaggcaatgtcatacaaaccttcttttacttttcttgcggcttgactggttgaattgactagtttgaaacgaacatctttgcgggtaaaatattttattaaattaataggtgaaggatgtgaaacaataacagatgtatcaagcatatcgtctctgaattcaaaatcaggacgaacagccaggccgtacatcggtgtatcgcacctgaagatctgcaatagctgcaaatccggcctcatgtagaaatgcttaatgccatcgtaagcatgtgggacgatggtatattccagcgggctttggagcgtcctttcgatgcatgattcaaaagtatcatgcaaggacaatttactgttcagcccttgtagaagagtaaaattggaaatgaaatgctttgctgcgtactcactgcttgtcccctcagggccgagcgtgttgactgtaatgagtttggatagtgaatcagttcttttttttgtctgaatgctattatccaatataatcatgagcaccaaccaatcttttaaaattttaagtaaattttatccagcggcaattgaactgtcaatgttttttgaaaatattgataattattcccatacaaacaaaaaaaccctttaaaaagggtttttaattataggaatttagaaactttgtttattgagataaggactgatcggccttctgctcaagcttgccgtactttttatatgcgaatatactgagcacaaatccgaggactgtgatggcggcgcaaatcaatccgacagctgcatagccgtatgccacatatacgggtcccattaaagcagaacctaatgtcacggccagattcgaggcgaggctgtaaaacaccatgacttttccgcgatgacgttctgagcagtcactcaaaatggtgctgagcagcgtcaccgtcaaactttgcattaatccccaaataaataggctgacgattaacagaaacattgacgccggcgcatatggtaaacacgccagcagaacgctgatgacccccagcgcaatcaaaagggagcgcatttttccgatgcggtcggctatctttcctgtaatcacactcatggaaaacccgattccataaatcatgataaataagcccgcagccgtgtttcctccggtaaaaacgtcctgaagataggtgcctaaaaaggaatacataccgtaaaaaccaatcatattacagaaggttatcgtgatataaacaggtacacgagggactttcagcgcatcccggaatgttcctgccggctcttctatttcttccttgccgctgtttttatgttgggcatggcggcgcatttcaaggagaatcagcaggacaactaaaacacccatcagggcgaaaatccaaaacgtccatctccaatgcaggacgccgccgataaatgatccgagcggcactccgaaaatcagcgccagcgaccagcttgaaacgatcagccccatcaccttgccccggtatgtataaggaacacgatcaccgacaactgcgtaagcggtcggaacaaacgctcccgcagccaatcccgaaagcgcccggcctaaaaagaagaaaaaaatattttgagccaaagcgcatatcaccgttcctatgataaagatcataagcccggctaataagctcagttctctggagtatttatcgcctaatggaaccaaaagcggcgcaccgataaaaatcataacgccgtaaatactgatagataatgcaaggacgctgacatctgagctgaaggcttttgctaaatccggcagcagcggtgagattacaagctcttcagatccggccgcaaatacccccatcgttaaagccagtgccaacaataacggaaaatgatgttttgttttgatgtcattgttttgattgctgttcattctttctcaaacacctcttccataatcttcttatcataaagttgtattatagtttagcattgttttttcactatttacaattcgaacgaaatatttataagttttattattttcatttaaatcccattatatatttctatatttcattctaaaaatacatgaggatgtaatgcgtaaaaaaagctctccggcctcccggagagctttttctattgtgcctctgtctgctttttttcaatcgtttcatgatttatacgctttttgatgcttagatgatagtatgcataacagaaaataatgatcggcacaccgcagtataagccaattctttgatccggaatgaaaataaggctgatcaacacgcagccatataaacaaaatccgagaatcgggactagcggataaagcggcgttctgaactccagatcattcacatttccgccttctgcaaggaaacgtctgcgaaagaaaaattgcgacgcacaaatggacatccacgcgacaactgtcaccatgcccgagattgagatacaccataaatacactgtttctgcggccatgacacttgtcagcagcgaacagcctgaaatgcctagcgtaatcagcagggcattcatcggcacgcctttttttgtcagtctggtgagaaaggatggacccatttgatttgatgaaagtgaccacatcatacgcgacgccgcatacaaccccgaattagcaacagataaaatggctgttaagatgacaaagttcatgatatctgccgaaaatgggatgccgatttgatcgagtaccgctacaaatgggctttcaatcacccccgccgttttgtacggaaggatggcaaccaagacgaacatagcgagcacaaagaaaaacagcgtgcgccaaatgacatttcgaatggactttggcagtgttttttccgggctttcactttcccctgccgcaatgccgacaagctccgttccctggaacgagaagttcaccatgaccagcgtaaacataacggccagcaccccattagggaaaagtcctctatcagtcataaagttagacaaaaagggtgtctcctgtccgcctttaaagtcaatcaagccaaacacagcggctccgccaatcacaataaataatatgatcgccgccactttgatgcttgaaaaccaaaattccatttctgcaaagcttctgacagagagcgcattaatcaaaaagatgacgatgccgaacacgaggcaccatatccagatcggaacggagggcagccacctttgcatcaaaatgcctgctgacgtcagctctaaccccactgtattcgcccagctgaaccaatacagccagccaatcataaagcctgtcgacggtcccagaaatttagtggcgtaggcctgaaacgatccggccaccggcatggcaacagccaattctcctaaacaaagcatgacgagatacattaaaaatccgccgatgatataagcggcaatggcgccgagcggtcccgcctggctaatggtaaagccagagcctagaaacagcccagtgccaatcacccctcccaaagcaatcataaacaaatgcctgcttttcatgctgcgctgcaattcatttttatgattctgcatcatccttccccctttggttcttttgccgtgatggtcatccggtagctttgcaaaagatgaacggtggtttgctgtatgaggagaggcaatacatgaaatgtgtacggtttatagactcgttctgtccatttatggccgtcttttccgtacacgcccatattaatggatggaatattcagcttgcgtatgtctttgaacggaatggtcccaatcatattccacccagggaagttcctgataaaagaatcaatttcgccatcggtttcgtgcagtgataaaaaactgccgtctgccaagtaggggaaaaactttttgaagacaaatgtttcgcctgtcgattcagcggttttgtcagccgcttcttttatcacatgctgcaaaagctgatctcttgcgctatcttctttcaaatagttatgcggcaggtaaggaggtgcgtaaaatagaatgacttttgcgccttgatcggggtcaagcttttgaagctcttcgattgcctgaaagcatctcatgcgaagttcaaggtgctcgttggctttgaatgtctgctcgatacactgctcgggatctatcccccggtttctcagcttttctaagtattgctccaggctatacacttgaatgtcccatgataaatgtttctttggcaggttggctctttttgcatattcttcataataatctgataatttttgttctgtctctcggcatgcttcctcagtgacttcaataagcaaatccatcatttcttttgctgttctttcataaataaaacaattgaagtacaagctggtgctgacagccgtttgcacattataggattccttgttatcacgctgatacaaacaggatgggggcagaaccaactccccttcaaccttttctgccagatggatgttattgtggagacggcttgtgatttcagatgaaatgaaatttgggtcaattcctgccagtgtatcgccaacatggacttcacgcccgtaaatgtaaaagcaaggcaacagttttcccgcggctccggtatagatatatcttgtctgatcaccatcgtaaagcggggtaataaaatccgtattaatagcagccaaatagtgaagctgtttttctttttttagccggttcagctctgaaatgctggcaagaatgcccgaatgctggctctcctcatcgggattggccataaacaatacatttcccggcaacgtctcaaggttctccgaaaaatgcaggagattggctaaatgcacggcgatgccgctttgcatatcaacagatcctcttccgaacatccaatcgcctgatttggcatcccgctgaacatcctgatcgaactcatagcggctgaaatactcggccaatttctcacaatcaaaagcgatatcctttaaagggccgaaatcttcaattccaactgtatccagatgggcatggtaaatgactgtatttcggctttctccatgtcctttaataaacgcaaaaatatttttgcgattgtatgggtcattgggaatggcctgttcccacacatgactggggttttcctgaaaataaggatagctcgtgatcacttctttgatgaaatctgcttttgtcccttctccaacggtgccgttcacgctgctgaggctgaccagagatgctgtcagcgcctccactctttcagccggattcatgtgactgatttttgtatactgcataaattgtcctcctgattaaaaagttgaaatcgtgcgatccgctaaagaatcgcacgattttatttctctcaaatcaaaaagcttcggacgttgttttggcttgcatatgaagaattaagtaatcgggaccgcctgcttttgagtctgttccggacatattaaaaccgccgaacggctgatagccgacaattgctccggtacatcctctgttaaaatataggtttccgacatggaaatcctcacgcgcccgttcaatgtgcgcacggtttttcgtcagaagcgcacctgttaatccgtattccgtgttattggcaatctccagcatatgatcgaaatcacgcgctttgcaaatcgcaacaaccgggccgaaaatttcttcctgcatcaagcgggcgttttcatcaacatctgcaaagatcgtcggctgaataaagtagccttttgaatcatcgccttctccgccggccaatagcttgccttcagatttgccgatttcaatgtatttcatcactttgttgtaggatgcttcatgaatcacgggacccatatacgtatcaggatcttctggattgccgacagtcagcgttttggtcagcgccacagctttttccaccacttcatcataaacatcctgatgaatgaccgcgcgggagccagcagaacacttttgtcctgaatatccaaatgctgagtacacgatagaggatgcagcaaggtcaagatcagcgtccttgtcgacaagcactgtgtcttttccgcccatttctgcaattacccgtttgagccatttttggcccggctgcactttggcggctcgctcataaatccggcagccgactgcacgggaacctgtaaatgagacaaaccgtgttttcggatgctcaactaagaaatcaccgatctccgctccatctcccggaatgtaattcagaacgccgtttggcagacccgcttcctccatgacctcgacaaattttgctgccactaccggggctgcgtcagccggttttaagagaatcgtatttcctgtcacaatcgctgccgccgctgttcccgccataatcgcaagcgggaagttaaatggagaaatgacgatgccgacgccaagcgcttcgtaatgatattgattgaactcgccagcacggctcttcaccggagccccttccttgagctttaacatttggcgcgcgtagaactctaaaaagtctatcgcttcagccgtgtccgcatccgcttccttccacggttttcccgcttccttcacaagatagcttgaaaattcatgctttcttctgcgcaaaatagccgctgccttaaagagaatattcgcgcggtgctccggtctttgttttttccaggaatcaaatgcctgcaatgcggcttgcatcgctttttcagcaagctcttgatccgctgtagacgcgtacccaatgatctcttctttatttgccgggttaatggaaatgattttgcggtccgtttcaattttttctccatttatgacaagcggataatgcttgccgagctgagtgtttacaaaggccagtgactccccaaatgcagttttattctttgcttccgtaaaatcggtaaatggttcgtgtgcgtatgtgactgtcatatgtagtccccctcgtgttatgaaatatatcttcgcatatgaataaaaatgcaagaatcatgccattttcttgtcttttgctgaaaaaacttgttgaatcgaacagaaatttgtctaacaggtgatcatctttctctatttccgatcttgaacgcaaatttattttgcgatttttgctctttaggcaaaaaacaaatgcaaaattattttgcggaggcttctcaaattagacccatccgcggaatcgcgatgcttctgccgattttctgatgcccgtcatgtaagccgccaaacgcatatccactttatgtgttgccgctgtctgataaattgtttcgaacgagctgaccatgacgcttctcaatttttctgcaacctcttcttccgaccaataatatccttggttgttttgcacccattcaaaataagaaaccgtgacgccgccggcactcgccaggatatccggcacaagcagcacgcctctttcattcaggatcttagtggcatcaatggttgtcggtccgttcgccgcttcaacgacgattgacgcctgaatgttatgtgcgtttttggctgtgatttgattggagatcgcggcaggcactaaaatatcgcaatccttttcaagcagctcctcatttgtgatgacgtcagtaaataaattggtgaccataccgaagctgtcccgtttatcgagcaaataagggatatcaaggccgtctgggttgtagagcccgccattggcatcagaaatcccgatcaccttcgcgcccgcatcgtgcatgaatttggccaggaagctacccgcgtttccaaagccctgtatgatgatgcgcgcgttttgcagcttgatcccttttttcttcaccgcctcttcaatacaaatcgtgacgccctgtgccgtcgccgtttcccgtccttgcgatcctcccaaaacaagcggtttacctgtaataaagcccggagaatcgaattcccgcagccggctatactcatccatcatccacgccataatctgcgaattggtgtatacatctggagctggaatatcctttgtcggaccgacgatctggctgatggcacggacataccccctgctcagcctttccagttctccaaatgacattgtccgcggatcacaaataataccgcccttcccgccgccgtaaggaagattggcaatcccgcatttgagcgtcatccaaatggataatgcctttacttcctcttcattaacttctggatggaagcgaacgcccccctttgtcggaccgacagcatcattgtgctgtgaccggtagcctgtgaacactttgacgctcccattgtccattttgaccggaatgcggacagtgagcattctctgcggctctttcatgagttcatacatatctcccggataacccagcttccgaagggcttccttaatgattgtttgggtagacagaaataagttaagagcttctttttcttcatctttcgagacttgctttgctgacatctttttcacctcattgtttttttggccggctgtaatgtaaacgctttaaaaaatcagcccgccaattcctttctgcattggattcacccttatcatcatgcaagatccgtaccagcttttgaatccacaaaaaaagagactgaaaacatctcagtctctgactacaaatctatcgattaacggggatcaatcaccagctgcgtttcagcataaaaactgccgattcccaaaccgtttactacatcgcctttaatcgtgtaagtgcctgcgcgaggaagagttttacgcaccatgacaaggtcaaattcggatgcgcctaacaaatcaagcgtaagcggaagtctgactgtttttccatcgtttaaaatctgtgtttctttcagtgttcttccattcactgaatctcttgtcgtagcatgaaacccgtcaggaaattgaaattctaccgctccaagagaaagcaccgcatttggtttatatgtcacttcaatatcagaagtggtccactctttcgtgctgttaactgtttttgcctcgattgatgcagactgtgcatgagcttggcccgaaggaagtaagattgatagtaaaacagctgaactgatgaataatgaagatacgaatgaagttctttttagcatgacatttccccctaattgattgttgaaatttggccagagcgtcctctgcagaaaaagcgctttttcataattcgcgaattaccagttctttttcttaaaaattaatctatcatcattttccatggaagtaaatgttttttaaggaatattaacacttggaattcaatgagaattccttcctgtttatacaaggttcaaatggacgattctcctctctttttctagtaaaatctgcctgacattttatatcttttatcctattttaaaaaagggcaaaaaaagtcgaagatgcctctgctcttcgattgatcacgttcctatttttatctgaattcagtgttccagttaaaaccgatcgtctcatcatcccacggaattcttttttcatcaggctgatccgggttatacgacatggtggtaaaatagataattgtcagcggcgtctctcccagcactctatatccgtgagccaccccttttgggattaataacagcatcgggttgtcttcgcccatataatagacgtccgtttctccttttgtctttgaatcctctcgaagatcgtataggacaacctgagcgtggccggttgggaagaaccagagatcatcctgcttctcatgataatgaaatgccttaatcacacccggatagcttttcgaccaagaggcctgcccaaaatgctcaaggaggttctcatcgtcccggaccagctcagcaaaaaagcctctgtcatcgctatgcttcatcaattttttcaccttgactccatcaatcacacgcactgctcctttcctgcaaatactctcgtaacgcttcccgccagtggcgggggcggatgtcggcttcttcaatagcccgatggctcagcacagagtatgccggacggggcgttttgttcccgtattcctctgtcgttacaggcaaaatggctgtttccagcccgctttcttccataattgccgtcgcaaactcataccagctgcatatgcctgaattgctgacatgatagatgcccggcggatggctgaacagtttgatgaccgcttctgctaaatccttcgtataagtcggcgaaccaatttgatcgctgacaacccgaagctcttgtttcgtttcagcaagcttcagcatggtttcaacgaaattactgccgccatgtccgtacacccacgatgttctgatgatcgtgctgtcttttgtcgttaatcgtatcagttcttctccgagccttttgcttttgccataaatggttttcggatcgaggggatcatcttccctatatggctgggttcctttcccattgaatacatagtccgtgctgatatgaacatattgagctccgatgcgggttgactcaagcgctgtataataagcgccgattccgttaatcaagtacgctttatcaagctctttctcgcattgatcaaccgacgtaaacgcggcgctattgaccacgatatccggctgataatggccaaacgaatgccgtactgagcgctggtcagcaatgttcatcatcttctttgttaacgcaatgacctcatatccggcttgcttcagctggcggcatagttccaagccaagctgtcctcccgccccagtcaccaatacctttgtcaatcagatcaccttctcatcggtcattgtctgtataccactgaatcgtacgcgcaatgccttcttcaaacgtcacttcctgccgccagcccagttcatttttcagcttagatgcattgatcgcatagcgccggtcatgcccttttcggtcttccacgtgggcgaacaattcctcacagcccagatgcttcaaaatggcactcgccagctctttattcgtgcgttcatttccgccgccgatgttatacacctcgccgtcggtccctttttctaaaatcagcttgatcgcgcggcaatgatcctccgcaaacagccagtctcggatctggagtccatcgccatacagcggaacaggcaggccctgcttcgcatgacggataatcgtcggaatcattttttcgctgtgctgataaggtccgtaattgttgctgcatcgtgtaatgatggccggaagcttgtgggttttcacataagacaacacgagcaaatcagagcttgctttgctggctgagtatgggttattaggagaaagcggcgtcgtttctgtaaacgcgggatcatccgcttttaaatccccgtatacctcatctgttgaaatatgaatcagcttcttggcttttcctttcaagaccgcttccgccaatcggtatgtccccatgacatttgtggtgataaacggctctgcttgggaaatgcttctgtccacatgcgattctgctgcgaagtgaatgacgccatcgtaggtctcatcaaacgcgcggtcgatatcctcctgaacgctgatgtccccttttacaaagcgaaaacggctgttttgctttaatttttccatttcctccgggtggctggcgtacgtcagtttatctaaaacggtaatgcgcgcatccgtttccctcagcatgagctttgtaaacgtgagcccgatgaagccggcaccgcctgtaattaaatatgattttgccatcacttttcgtcctgtcctttccgtaaagcctggtgtacaagctgggaagcgagataaagcgattcgtgagttccggcatctacccaccagcctgataacacatcatacgtaagctggctgttttcgatgtatagattattcacatcggtgatttccagctcgccgcgctttgatggtgatatttgttcaatatatgaaaacacctctgcatcatacatataaataccggtaacacaaaggttggtcggtggctgttcgggcttttcgatgatggaacgaatccgcttgtttttctcatcaatctcagcaatcccgaagcgttccgggtcatcaacttctttcagaagcacttttgctcctttcccctgctgttcaaagcgttctgtataaggctttaatgaatcttcaaatatattatcacctaataataaaatgaaagactcttttttcgtaaagcgctttgcataagacagcccatccgaaatgcccgatgctgccggctgtacttgataagtgatagtaacgccaagctcttccccgttcccaagcagtttgtaaaattgcggcatatgctccttttggctgatgagtaaaatgtcttttattccggcttcctccagcttcataatcgaccagtatatcatcggatacgggcctacaggaagcaaatgcttgttgacggctttcgttaagggcataaggcgtgagccgtttcctccggctaaaataacacctttcacattaacacttccttacatgcatttttatatctcttgttcatataaatcttgaagaatagctgttacccgtataatgcctttgccatccacgagcggccttcctcccttgtgcaaagaaaggcgaagaggatagctgctcataatgcgtgacatctgatagatgagtgtttcatccggtacaagctcacccaagccaagatcaagagcggcgccttggtcagcaaatgttttggctgttgccgtttgatgcccaacctgagaaagaacaaggcacggcacgccgatgcaaatggcttcatatagagagatgccgccggcgacaatggctgcgtccgcttgtttcatcaaacccgccatatcatttgtctgttcgatcaccttgtactgcggcttcttttcgatccgccttcggactgcctcttgatgcggtgaagcgctccccatcacaaaaatcatgtttttgtcttttatgccggggacttgatcagcggcagccagcactttaaaaataagctgcttcggatcacttcctcctaatgcaacaaggatattgcggcagtctttcttaagtgtgtaatcctctcttgcggcctgaaaggcggggtgaagaataagatagtccggaccttcataaatgcgtgtgtttccctgaacgtacaccctgcttctgatgtcaccgtaaattccgttaatgactgcgtcactatattgaattgatttaccgtttttctcttcaaaaagaacaattttcgcatctgtctccgtctttattttctttaacagctctgcaggcgcgcctagaatatcaaacaaaagcaaatcaagcttcttgctttttatttcccggagaataaattcgtgctgctgcagctccggctttacgatgacacgccaatgctcttcatgaagaaacgcttcagactcctgattcgtataaaacgtaatcaaacatcgctgtttgagcccctccgcaagtctcttcatccggacaacatggcccattcccttttcatagccgccgtctgcgaagatcccaacacgcatggctattcagcctctcgttcgattgccgcatcggggttccggttcagaagggtgataagctctgaggcggatacaccagggcgctcgcctgctttttgatagagggcctttatcgattcatagtcttcctttgtatcaatggtcagccgatattgaggggcgcgaaatcgttccggcgcctctaaaaactgaacacgataaagagctggatgattccttatatataacgtgacatgctcctgatattgatcctccatattctgaatacggctgatgtcaattaataggttggcgttgaccacttcgccgcaaatccctaatggggcattcaggatatacgtataatccgatccttgatcaaaatgcgccttaatcattacatcgagcagctccggatcgacaaacggattatcacccgttaaccggatgatgactgacggtttaacagcttctatgaccttcacaaacctatcgaggacacgttcttcgctcccgcggaaaacacgaaagccttgtttgatacagtgcgcctctaatatgtcgtcagtttctttgtcagacgtggcgatgacaagattatcccgatccttttggtaaaacgcgcttttccggacacggtgaacgagaatgtcaagtaaacgattcgatccgagcggccgaagcacttttcccggaagccttgttgaacccattcttgcttgaatgataaagagaatatcattcatgaaacgggctgtccttcagtaaaatgtcatcccagacaatgcctgtgtcggctggaatgtctcttacagcccgaacaccgctggtcagcagttcaaaaaatctcgggtgcagcccctgcggcttttgtccgggccgaagcactgcgatattgtcttcactaaaggcttcacctttttgaatcggagctgttgtaaaaatgcctctgtatgcaaaatttctgatttctccttcgatggaggttgttgttttgtatgaactgccaagcagtttttcagagaccggctttgtgatcccctgtttcagctcagcttccgttttcctgatgccatcgaccatttctttcaattcatccggatttaatgcaaacgagtggtcggcacccggcagatctttatcgatcgtaaaatgcttttctatcagttttgctccgagccgaaccgcggcacacggcgcttctgtcggatgctcgctatgatcggagaagccgattactgcctcaggaaaagcggcggcaagcatcggaatgacgctgaggttgctgtactccggcggtgctgggtatttcgccacacaatgcattatggcaatttgattgtttccctctgccctgatggtgcgccaagcttcgtgaacatcagagatttcagctccggctgtcgagaaaatcatcggcctgttcagccgggcgacatatttgagcagcgggagatggttaatttcataggatgcgattttaaaagcgctcggcgaggtagactgaagcagatcagctgacccctcgtcacataccgtacttaaaaagatcacctgcttttcgcggcagtaatccaatagcggtaaaatccactcagcgggcatttccatagattgaaccaaagaaaaaatagagacgtccttgcccgctgccgtcttgtacaaaccaggatctttctggtacatcctatcagcttggaacatttgaaatttcacggcatccgctcccgcttccgccgcggcgtctatcagcgcaaaagcctgatcaagcttcccgtcatgattaatccccgcctcagcaataataaaaacaggagcgtctttgcctacagttttattcgcgatctgaaacgctgccattatttcgcctccttgcccggccaaatatgataatagtaatacgattgttcagcggtgaagcccattcgttcataaaggcggatcgcccttacattgtgaagctgcgtccccgctgttaccgttctatgcttctgggtctccggttgttctatgagattcgccaataaatgaaatgcaatacgttttccttcaaatcccggctttacagccatcaaatcgagaatgcattcatcatctcttgataagccctgaagatagccgatgacctcgccattgtgtttagcgacaatattgaccgccgcccttccattcagattgtttcgtgtccactcctgaaatattttgtttgctgcatcgcggctgagatgaggatcctgaaaatatctgctttttgtaaacgagtctcgggccagctcacatatcgcttctgtgtccccgggctcaggcgggcccagttcaaaaaatggcggtgttttgtcataaaaagacggaggcatcgccagcttcagcaaactcccgacaaagtaagaggatggctgctgctgtatcacatgcgcggctccgatatcttcagccggaacgcggacaaagataaaatccgtttcatccatttggcgtacagtataaaaagcttcaaacagcctctttagctgcccggtactatttgccgcaagaagtttgacgttgatgactttcttctgaagcaccttgctttcccacaaagaatcttcgtaaagcaatacgccttggagcctgctgttttcaaaaaggccgagggaaaattgatacggaacatccagtgtaagctttctgctttggagaaattcctcaattgcctctttggagacattttcttttaccgtatacacttaatcagccccttttacgatatcccgcacagcttcaatgacatcatctacatcgtcgtcagacattgatggatagagcgggagagaaagggttcgtttatagtaattcatggcattcggaaagtccgcttccttatatccaaattgcttttgataatacggatgaatgtgtactggaataaaatgaacgctagtgccgatattgtatttatcctttaaagccgtaatcatttcgctgcgcgtaaccccggcttttttttcatcaacttgcagaacatatagatgccaggcgtgcctgccgtcatcatggacaaacggcgtgatcagcccaggaatctgctgaaaagcggtttgatagcggccggcaatctcttctctccgtttctgcatatcatccagccgtttcagctgatgaagtccgagggccgcctgcaaatcaaacatattcatcttatagccgggcgattcgacttcatagtaccagctgccatttgaagaataacggttccatgcggctttactcatgccgtgaaggcttagcacccggatcttatcggcaagctcctcatcatcagtcgtcagcatgccgccttcccctgtcgcgaggtttttggtggcgtaaaagctgaatgccgttgcatccccgatagaaccgatcattctttgcttataagtcgtatataccgcatgtgccgcatcctccagcacgaataaaccatgattttgggcaacagccaatattgcatccatatcgcaggactgcccgccaaagtggacgggcacaactgctttcgttcgcggtgtgacggccgcctcaagctttaccgggtcaatattgagcgtgttttcgtcaatatccgcaaacacaggcgtcgctcccgtatgaataatcgtattggcggtcgagctgaacgtaagcggagaggtaatgacctcgtccccgggcccgatcccttttgctttcaaagccaaaaataaagctgcggtacatgaattcaccgccacggcgtgcttcgccccgacaaacgcggcaaactctttttcaaactgctgaaccttcgggcctttagaaagccatcccgattcaagcgtttctgtaacctcctgaatttcttccttaccgattaacggcaatgagtaagggagaaaatgatttctcttttgcaccatttctttgcgctcctatcattttattcagtatcttcccgcctgtaatcaacccctgttttggctttcagttccgcaaataaagcatttgttgattctgccaccggataattagccgctatgaatgccaggcgcgcctcttctgctttttgatgcacgtcgggacttcgaagaacttcaaccaaggtgtgcaccagttcatccggctggtcaaacataaaatcgccaagagactcataatacggatacgagcgatttccggacgattttccgatcagcacaggcttttgaaacagcatggcttcaagaccgactgtcgaggtctgcgtcactgcggcatcagcatacggcagcaaatcataaagctccagctcctttttgatgactctgcatgctttatgttttttcgccgcctcgtgatacagatcaagcttgttttttccgatttcccacgggtggggtttgataatgatctgcagctgcttctgatcagaaagcccctgcagcacaccggaataaaagtcttctgaaaagggctgagtggcaatgagcacaatttttttagtcggctgaaaagcaagttttcgatagaatatggacatatccataggcgttctgttaaaaatctgatcgaagcggggatgtcccgttacgagaatctgctcgggtttacagccttttcgtatgaaccactctgcttcatacgcaccaaaaacagcttgataggttgtaaaaacaggaatgaaggcttcatctcccatcaatgcgccatgctgaagacaaatgctgacggccccttttctttgacacatgagagcgagcaccctgctgtaaatgtcttctgccgttccgacaataacagctgaaatcttttcctgttcaaacagcgcatcaactgtatcaatggcctctataaataaaggaatatctttgaaaagccggtcgcgaaacgcttgatcaccaaatgccgggtgatcatcataaggggcgagaagcgaacaggctgtttcgagatactgcttcgaatcgcctttttggcatgaatccgcaatctcccgcttgctaattacaggcagatcacaataatgcggcaaactccatctggccaaaacagccgttttttcaggatcaaattgatagtaatttccgtttgaaaaacgcaggtaatcaaagtgcaaaatgactttccctttaacaggtttgtcatttgttttaacgattttttggattctttcttcaaaaaacggctgaatctgtccctcatcgatatgctgatccaccgatccgaataattccggttcttcttccatcatcaccctcagctcagggctgatgtattgataaaaattactgataagcccaagcggaatccctttgtagcgaagtttgtcaaaaagctccacgtacttccggtacagcacccaataattgcttaaataggccgacaagctctcaccccattccaagcttttttaatgattcacgcagctctcggcaatttcgctgcggaggaaggttcctgacaaattcatttttttctgattcaaacagctgaaagtgaatcgattggtcggtaatataattcaggtccagctcctcatccagtgggtaaaacggataaaaatgattgactctccaaaagaaccgcgcatctcctatacggtaaaacgccgggctttcatcccaataggagccaaacttctcctttaccttctcaagcaccgaatacctgtgcatcaccgagcaatgatcaattgcgcacggtgcgttccatgtcacttgagcggcaggcctgacagtttcttttacaatgtcgcgattctcgtttaaatgataggttttggaggctgagtaaatcacagccttttcaggatgggtatcgagctcccgcaccattttcaggaggcggtccggcatatagatgttgtcatccgtcgcataggtgatatattcaccctccgccatctcaatcgcctgattgatcagtgccgcgtatctcgttttttctgttctttccttcactccagatatatcgctttgataaaaacgcactcggttatcattcaaaaaaggacggattacattcagcgtctcttcattggagttgtcatccataataaacaattcaaaatctgaaaatgtttgtgagagtatgctagaaatggactttgccacataatcgcttttgttatagctcgtcataatgactgatactttaggcaaatcctacacctccttcttggaacttcacacctgaaactatcgttatcttatgttgcttatgctcaagttgcgctagggatacaaaccaatatgcgaaaagtttgtgtatgtctctgaaaaacagcggctgcccagagcgaaatctgatcggtccgctgttctttttcagcataatccaagcatcagcctcataaggtgaaagagataaaaatcgcaccagcgactaagatcgttttccatcggaggtgagtcatcgcggagcgttcacctatacatccagaacatgttttgaatggttttcataaaaaggaggaacgatatgaaaccgaaaaaaaatcaatatcagcaaatgcaggcatttgataatatgcaggggtatcagcctcagtttggcgccaacccgtacccgcagcaaggccaaggctcacaaatgcagccaatggggatgcagccaatgatgccaatgcagcagggacagcaaggacaacaaggacagcagggatttggattcccgggccagcagcagggcggcggttttcaaattccatcggggcctacaccgtcaggaccgggccaaagcgttcccggcatgctgcctgttgaggaatcttacatcgagaatattttgcgcctgaatcggggaaaaacggccaccatttatatgacatttgaaaacagcaaggaatggggctcgaagatttttcgcggcgtcatcgaagctgcgggccgggatcacattattatcagcgacccgaaatcaggaacacgctacctgctcctgacaatctacctcgattacattacatttgatgaagaaattgcttatacgtatccatattccatggcgtcctattcgccaagataagaaaaaagccaatcactcatatgatgaggattggcttttttgattatagatatttgacggctgcgacaacgatcataatccaagaaataataaacgccacaccgccgagcggggtgatcgctccaagaatggagatttgcgtcacacttagaatatataagcttccggaaaacagcacaattcccgcaaacatcagccagccggctgtcgtgacactgcctatgccggataatttatcagccagaaacgcgacaacgaataacccaagggcgtgatacatatgatactgcacgcctgtgtgccaaacctgaagatatttatcaggtattttcccttctaatccgtgagcgccgaatgctccgagtcccacggcaagcagggcgttaatagcccctaatatgataaaaactttcatctatctctcccgccttttcgttaaactcatatcatttatcttatcgcacctgcaccaaaattcaatgtttgttctccgttgacacgagattgtcggattttctcctgcgccaaagctggaactggtcagctgctattgcagcaagcgtccctaatacgagcccgttgcttaatagagaaataaataccggatgcaatccctttaacgcagtttcaggaacaaacatgataccgacccctgtcagcagtgagatgccgatgatagacctcaccctttttgattcttctttctcatacgaatcaaattcggcaaaggccagaccgcccattgcggagaacacaacaaaattcaccgcaaatccaacgggtgacggcaggctcgcaaacgtattcataaaaaacgggatcacgctgattacgataaccagaatactgccgagtataaacggttttttagaaggcatcttggtcgtttcaataaaacctgcggctcccgaaatcggaacaggcgcaatagctcccgtcaaaccgctaagcagatggctgaatgaagctgcaaaaccggcatggcgttcatgatgctttccatcaggctgtttgctgaattttttcacggcgatgtccacgaccttcatgctcgccagcatattcacgatcagcaagatggtaataaaaatagaagtgatgatcaggccgctgttaaataacggtggcccaaaaggaaacagggaaggcagctgaaacagccggtccggcatttcaatcggctttgccgctccggcagccgcaaacagcacccacccgccgaacaaggctaataaaatagaatattgcttaaaaaacacgatgttcgaatttgtcattataaaggcggcagcgatcacaacaagcgccaggccaaatacaagaccgtccaccccgtcctgtcgataaccgattccgagaattccttttataatgggctgactcagctgcatgacaagaagcaataaatagacgcccgttacaaccggagtaaacaattttgcaagtctgtcaatgaccttgaaaacacttaacaaaaagaaacatacagcgcttacaagaagagctccctgcaacccccgcagtgtgtctccatatgtcgcaaacacagttcccgttagccctgcgtagatcgtatacactccccaccacaagccggctgggctttcattgatcggcagtctgtggcctttcaaacactgaatgacggcggcaatccccagtacaaaaaaagtgctttgaatcaatctcgcagaatctgagtgatccagatgaaacgactgggcaaccgccaccggaacaactatcgccgcagcaatgataaacgctgtccattgcaacgcgccaagaaccaatttcacgtaagctcaacctctctctttaaaaatcaaataaagactctccgtttccatcctcttcctgcttctctttttcttgctttcgatatttgtttaatcccgcgctccccatcattttttccatcatcagctggtctgtcgatggcggcgcggcaggacttggcgtaacgctcggctgtatgcggggcgcgctcgcgttctccggctgatcaagcacgacatcacacagagaacggacaaccgctacataacgcttcagctcctcatcccgttcagctgtttttgcttttttcagctcctcttccatcttttgaattaatgcagatatatgaatgttcatgaagcaccctccaaaaaaataaatgttgtcttcctgcattttatcaaattcctgctgtaaacgcagatatgagtttgttattttttctgacaaaccttgcgcgattgacaagcagaagagatttttcacataataaatcaccatacattacaaaaaggagaaacggaatgaacagcatcccctctatcatcagcaagcataaagcctattttgcggcgggacatacgagaccgcttgaatcgagactgaacattttgcgaaagctgaaacaagccgtcagaactcatgaagccgatctcatagccgctctctaccaggatctccacaaatccgagcaagaagcatactcaacagaaatcggaatcgtcttggaggaaatcagctttgtcatgaaacggctgaaaaaatggtccaagccgaaacgagtcaaaacgccgctgactcatctaggctccaaaagcatcatcattcctgagccgtatggaaccgttttggtgattgcaccttggaactatcccttgcagctggcgctttctccgttgattggagccattgcggcggggaacacggtcgttctcaagccatcagaatatacgccggctgtttctgctattctttccaaactcatcagcagcgtttttccgaccgattatgtcgctatggcagaaggcgggcccgatgtcagcacagcattattacagcagccctttgactacattttctttaccggcagcgtagccgtgggaaaagtcgtcatggaggccgccgccaaacaattaattcccgtaaccttggagctcggcggcaaaagcccctgcatcgtccataaagatgctgacattcagcttgccgccaaacgcatcgtcttcgggaaatttacaaatgcgggacaaacctgcatcgcaccggattatttatttgtccacgaggacatcaaaacgaagctcacagaagaaatgaaccgtgcgatcagagaattttacggccctcagccggaacggaatccgcagtacggcaaaatcgtcagtgaacggcactatcagcggctgctcagctttctgaatgacggcatcccactcacaggcggacaatctgatcccaatcatcacaaaattgcgccgaccattctcgaacaagtgagagatgactctccagtgatgcaggaggagattttcgggccgattcttccgctctttacataccgcaatatcggggaagtcattgagaaagtccaatcgcgccctaagccgctcgccctgtatctcttcaccacaaacaaagaaattgagcgcgctgttttaggaaatctgtcgtttggcgggggctgtgtcaatgatacgttaatgcatgttgcgacgccgtatttgccattcggcggcgtcggggaaagcggcatcggcagctatcacgggtttgacagttttaacacattcacgcacaaaaaaagcgtcgtcaaacaaacgaaccgtttcgacttcgcatttcgttatccttcctccaaaaacgggctgcgaatgattcgaaaaatactcaaataaaaaagcgcagataacctgcgctttttacaaatccttaatacaccaatcaatcggcgcctctcccattttctccaaataggcattcgcccgggaaaacggtctgctcccgaaaaatccgtttctcgcagaaaacgggctgggatgcgtcgattcaatgataaaatgcttggacgtgtcgatccgttcttttttcatttgggcatgccgtccccacaaaataaaaataaccggccgctccctttcattcagcacgtcgataatccggtctgtcagtcgctcccagcctttccccttatgggaattcgcctgtccgcgccttactgtcagcacagtattcagcaaaagaacgccttgctttgcccagctcactagcgatccgtgatttgggatgctgcacccgatgtcctgctgcagctcaagaaagatattttttaacgaaggcggctgctttacaccgggcttgacagagaagcttaaaccttgagcctgtcccggcccgtgatacggatcttgacccaaaatgacgaccttgacatcatcatatgatgtataatgcagcgcgttgaaaatatcccggctgtccggataaatcgtttgctccgcgtattccctcttcagcatctctctgagctcttgataatacggtttctcaaactcttcctttagctgattccaccagctgtcttgtaaaagctgtttcaagattcaggcctccttacgaacgatgaagtctggaatagacaggctcgccatcccaaaccatttcactttttgcttcccgcctcttcatctcaggctcttcaagcaggacggcaaagtttttcgtcggcagctccccgagtccgtgcttttcacttaaacgatccaaatattgcttccgcttggcgccaaggtccgcagactgattgtctcccacgtcactgaaggcataaatcacactggcgcaagggacacgcttcacccggtaatccttggctgcgcgcagataaaaatcccaatcccagtaattgtgcacatcagcatcgaaatacccgatttcatcatgcagaaaacgtctgtacatgctgcccgacggcacgtatgtagaaaacactctcatatcctcatagtcagcggtataagcaaacaatttccgtgacactggataccttgttccgtttttctcttcaaacgaaactatttccgcatcagaatgaacgaagtctgccgtttctatttcctttgccattttctcgatatgccctggcgtaaagaaatcatcgtcatcacacagcataatgcaatccccagacgcctcttttacaccggcatttctcgcagccacatgccccgagttcttttctaaattgatgacagcaatcggtagctccggatacagtgctttgaccggcacgaccgattccccggcatcattcacaataataatttcatacggcttcaaggtctggcgggaaatcgactccaaaagctcacacaaagccggaatccgattataggtcacaattacgatagaaatcttcatgatgctctccttctcattttcatagtcatgtactattaaaacatatattggacgggagatcagtgggaatatcctactgaaacggcatactacaatgatagaaacagcaaagtggctccgatcagaagcaccatgatcagcatcagatctccaaagacatgaaagaaatctttcatgcggacgccattcggaaggataagacgccacagcttagattgatagaccggcagcagcaccagtgcataagaaagacacaaaaatgtaaaagccggcggcacaaaagcacagcctgcatcgtcccaattcatcatgatgtctttcatactagatccatccaataaaaacaaagatatcatgagggctagcaacacaaaggaccccaattgaacctcaaacaggcgcattttctggttatatgcaaatcggaccgcccaaaaccagacataagcatatgaacatagcagcgtaagaatggcacctgctgtaaagacgacatcaggcagccgatcaagcagaaaaacaaaaggcaagctggctgccatagccaagagcatgcagccaccagtaaacaaaaatactgccccatgagctacaaaaccatataaacaagagctaatcctcacgacatacacctcctttacatagaaattctatgtatatacctaaaaaatcagacaagctgacgcctgccaatataacagcccattcggccaaataacggaaataacagcgttgcaaaagcacaagttccaacaaaccaaggtgtcaacaaggattgaaacagcgcagcaggaattacattgaatagaaaaacaagcataaaaatgacgtttggcaccattgagatcagaatcgtatgtagaacaagcttttctccgcgttttccaaactccttcacgccttgatacccaatcagcacccagtagatcatatatgcagctaagatcagccaaacagaaacagaaatgcctttccatactgcttgaacaaacggtgattcaagccatacatgcattattgtaatcgcaatgccgacagcgaatagggcactgttacagaaaagatggaacatcaaaaacgcacggaacgttactggctgtattttcttaaacgaagaaacaatgtcagttggtgttccaaacgcctgcaataaagtctgcatagcttcctcctcactctttccttcctgaaaagagcgaaacagatgatgttcaatatggctctcaatctcttctatcatcgcctcaccctcaggaagccctttaagcccgcttttgatttcggatacatatgtttctttatccattttgtccgctccacttcagtattcggtccatcatggctgaaaatacgctccattccttcgtgcgttccgccagcacttctttgccctcgtctgtaatccggtaatatttgcggtccggtcctttctcctgcttctcccagtaggaagaaatatacccttggcgttcaagcttgtgaagagaaggatacaaggtcccttctttcatctgcagttcatttccgctgcggcttcccatttcttttacaagctcatagccgtacatcggccgctcgttcagaagcgtcaataccaatataaccgtgcttcccttaaccagctcacgatttaacatctcaaaacccctacctagttttcttatgtagcattttacgaaagcccgttgagattgtcaaatgattcctatagatcttctatattgtgatacagagaaaatctaactataatgaaagacaaaacacgatggaggttcaagacatgtctatgcataaagcactcaccattgccggctcagattcaagcggcggtgctgggattcaagctgatttaaaaacatttcaagaaaaaaacgtatacgggatgaccgccttaacggtgatcgttgcgatggacccaaacaacagctgggaccatcaggtattcccgatcgatactgatacaatccgcgcccagcttgcaacaattacggacggcatcggcgtggacgccatgaaaacaggaatgctgccaaccgttgacattatcgagcttgcggcaaaaacgatcaaagaaaaacaattaaaaaatgtggtaattgaccctgttatggtttgcaaaggtgctaatgaagtcctttatccggagcacgcccaagccctgcgtgagcaattggctccgctagccactgtcattacgccaaacttgtttgaagccagccagctcagcggcatggatgaactaaaaacagttgacgatatgatcgaagccgcgaaaaaaattcacgcactcggcgctcaatatgtcgtcattacaggcggaggcaaactcaaacatgagaaagccgttgatgttctctatgacggagaaacagcggaagtccttgaaagcgaaatgatcgatacgccttatacacatggcgcaggctgtacgttctcagcagccgtgacagcggagcttgccaaaggtgcggaagtcaaagaagccatttacgcagcgaaagaattcatcacagcggccattaaagaatccttcccgctaaaccagtatgttggtcctacgaagcattctgcactgcgcctgaatcaacaatcataaacaaaaggggctgcctaacaaagaggcagccctttttaaatcaccgaagacttttcacagaaaaaactgccgatcccatcggcagcctgtttatttgatttttaaattgtttgcagatttcctcaaaaatgtttctatcgactgaacaaaaagtgcatattccttcatttgttcatatgcccgcgtgagaatttccgccgtttcactgtgcggcgttgttccgccaagcatttttttcagctgaagcagcacatccttatattcttcccgcttatcttcaacttggttagcagccttttccaaacattccggtgttatcttctgttcatttatattcaagaaaacaactccttttacagaaaaaaatagtaggttatcgttgaagaatagcacagatggctcagatttcacataagaaaatagaaggattttctacataagtgtccaaattctgacattcatttcagatttcccggtcgaactggctgttacttcatgatttcccgggaaaggaaaatatctcgcactaaagacctcttctccgttattgataaagatttcaacagaggatgcgtcgataaacatgtgcacggtatgcaaatccttgatgcggcaatgtctcgcttctgttctttttccgtcaaagccctttcgttccagcgtaacattccccttgtctttatggaaggaaaacgtagccgttccgcggatactgattgaaaagcctgactctgtatgaatgtcttccagcagaatctcagttctttcaggtttttccactggaagcgtaccagatgatccatgcatgttgatgtgtatttttttctcatttctgcgcatggcttttagctcaggcagcggctgctgaatcagcttctcgcctgatattgtcagctgtctcggcagcgtcatgcagtgaatccagtgatagtcaatcgtcggatgagatccttcatcctggtcaggcacagccatccatgcaaacaaaattcgtctgccctgatcatcttcaagtgtttgcggcgcgtaaaaatcaaaaccttgatcaagttccctaaaatcaccatgcttcagttcaggcttgttataatcgagacgcccgacaaaataacctgactgatatacgttctgataaaggaaaccgtcagcctcaagcccttgaggcgaaacaatcagcacgtccgatccttgaagggaaaacaaatcagggcattcccacatgtatccaaaatcgtccagcccgttgaagcccgcgccggttatcgggccaagaaatctccactcactcaggttatcagaagcaaacaatacagcctgccctttcaaattctctgtttgcgcaccaatcaccatataccatgtgccttcatgctcccataccttcggatcgcgaaaatgcgccgtatatccttccggaaggcgggcgacaacaccctttttctcaaaggacagcccgtcgtcagaaacagcaaggcattgatacgtttcccgatttccatcctgatccctgacatttcctgtgtaaaacagatagagccgatcgtctttcgtgacagcgctgcccgagtagcagccgtttttatcaaaccaatcactcggagccagcgcaatctcttcccgcttccaattcacaacatcctgtgtcgtataatgcccccaaaattttgcgccgtgccccgtctgaaacggctgccactgaaagaatacatgatagctgcccttccaataaatcacgccattcgggtcattcagcagcccaaccggcggcatgatatgaaaatgctggcggtgcggatcgctgttagcgatgggctcttttttctccacttcttcataagcccggcgacgaagctcctggtcatgtgctgtcattttttcctctcctcatcctcattaatcttcatgacaaatgctgcaatgaacgctgacactgctgcaatcgccatgccaatcagatagtgaatcaagttgctgacgccaaacggagccgcaatggcgatcatcggaattcccgttaacccgtaagcgtttgcagctacatgtgtaaagacgacatatgccccacccaatgcgcctccgatcatcgcggcgataaacggttttcggtagcgaagattgactccgaatatgacgggctcagtaatgccgagaaaagcggaaaatgctgccggaagcgcgatttcttttgtctttgcctttttcgccataaagaagacggcaaggcctgccccgccctgtgcgacattcgccattgaccagataggcagcaagtagtttttgcctatatctgcaattaaccccgcctcaatcgcatggaagctgtgatgaacacctgtcagcacgatgagtgaatacgtgcccccgaaaatcaaacctgcaacaaaaccggcatggtcatacacataagttaaagcaaccgtaatcccggagccaagggctcttcccagagggccaatcgcgataaaagcaacaaacccggtgacaattacagtaacaaaaggtgtaacaagcaagtctaccgcatgcggaaccacttttcttgtccatttctctaccttgctcattacataaaccgccagcagaacagggatgacagttccctgatagcctagaagcgcgatatcaaatccgaaaagatgcatataatcaggtgtggcttccgccaatccccatggatttaaaagagacggatgaatcatgattcccccgatgaccgctcccaagtatggattgctgccaaactcttttgaagcgctgaccccgattagaatcggcaagaaaatgaatgctgcacttgaaaacatatcaagcagctgcaaaagcgcagaatccttgctcatccaatgaaacgcattgatcatacccagcaatcccattaataggccgctggctacaatagccgggatgattggaacaaaaatattagaaagcgttttcgcaaatctcgcagcgggattcagcttttcttttgccgcatcctgatgatttacgtgttcttcacgctcgatatcagcttctttagaaaaggcatcgaatactttattcacaaggcctgttccgaaaatgatctggtactggccagagctgctgaaagcccctttgacgccatcaagctcttctacttgtgcttgatctatctttgattcatctttcatcactaaacgcagtcttgttgcacaatgagccgcgctgataatattttctttccctccgagaagctcaatgaggcgttttgcagtctctttgtaatccatctatttctcccccttttatttaaacaaaaaagacctaaaattcgccaacgaataaaggacacagcgatcctttttcatttacgcaaattttaggtcttgcctgctttaccagtcacaatcccgcttattcagattaagaatacgctttcatcataaatcatgacagcgttttcgtcaactatttttttagttaaatagtttgataaaacatgtagacaaaaattcgtaaaaattaattgtgaaatacttcacaatatcgtgctatactatgctcaatcatgaaagaaagcaggaaaagacaatggaaactcaagcattgcaaaaggttgaacagtatgctttgaaaaaacaaaacatattcgcttcaagcaaaatccgttatgtgcttcggtccattttggccagtatgtttattggttttggcattacagccgcaagcaaaacaggcagctatttctttatggctgattctccgtttgcctttccggcagccgctgtcactttcggggccgctattctgctgattgcttacggaggcggagatttatttaccggcaacaccttttatttcacctataccgcgctccggaaaaaactcagctggcgcaacaccctgtacttgtggatgtcaagctatgccggcaatttaatcggcgccattctgtttgccatcctgatcagcgcgacgggactttttgaggagccttctgttcattcctttttgattcatttggcagagcacaaaatggagccgccggcttccgaattgtttttcagaggaatgctgtgcaattggcttgtgtgcctcgcctttttcattccaatgtctctcaaaggggaaggagcaaagctttttaccatgatgcttttcgttttctgcttctttatttccggctttgaacacagcattgccaatatgtgcacattcgccatctcgcttttgatcgagcaccctgatacagtgacactgatgggagcagtcagaaacttaatccccgttacgctcggcaatctgaccgcgggaatagttatgatgggctggatgtactacacactgaatcctgatcaataaaaaaacttccagagatcactccctgcaagtcaaagcggttattccgagagatcttgaagacgctggacatgcagcgtgatatagccggcctcggattccggcaaatgtaattgatattcatttttcaaaaactccgccagctccagcgcacattgataggcgaatgaatactttttttggatgaaataaagcatctcctcgtccatacgatggagcgcttcatttgattccaaccggctgaccgcgtatcgcaaatgcgtgacaaggcgttgataggaaatgctgttttcatccacctttcgattaaagtattgttctattttctctatcatttctttgatcatggtcgtatgcttcagcgctgaatacatgctctccgcatccatcttcgccgtatggatgtgaagggcaatataacccgcttcatcttcaggcagagacacgcccaatgtctcttttacatgtccgatcgcccacaggccgatctcgtattcttttttatagagcgcctttatctcatgcagcaatttattctgcacaagcaacccattttgaatcctttcgatcgcaaaggacaaatggtcggaaagcgcgatatgaatgtgatcgctcagcggcgccgcgagctctccttccgcatagctgatgatatcctcagctatttctacatgctcctccggcagtgtttgcaggatttgtttgaacttttcattctcgtcgcgcacgacaaagattttttccactttattcatagggatgagatcatttttctttttttgaaaagcgattcccggccccatcacgattttttcctgatcatcctcttttattaaagccgcattgttgtttaatactttatagattttcaagaggttatctctcccgccaatttgcttttgactgggattttacctccttttgaccgccatgtaaagatgcgggcccgctctctcctgctttggcgattccttgaaggcttgcaaacatcttcttttataaagcgcggcggctttcgctttctgcttttcttcctcattcacagccatccgccactcataaaacgaaacgagtcctgcggcctgcacagccgcctttctttggtatgtacgctgagccgaatagaccgcggcagccgcagtttttctgtccggcgtcacccagttcatcaaaaagaccatccacacccgtaaagatacaagcaaacgtttcatagaaaaacatccctccgcttctttttggcaggcagcctttttagcagcccgttttctcagccgcagcccgcaagaaaagacggccgatttcttttctcgcaaactagcggctctagcaaaactcatgactctatgatagaccgtggaaagagaattctttgtcacaatatgagtgaaaaaaccaactagtttttagaagttttgttgaaagctgaaagaattgaaatgaaaattggagaaccgctttgaaaactttatacacaagttatcccaaagataagaacaacttaatcacaagagatatccacatgtccacaaactctatctatattttgtatacgaacgtatattcctaactatatatatacacaggtttattcacttatacacagggttctgtgtataactccttcgttatacacaaacaaactccaataaatggtccaaatgacacaaggatttttttgaattttcaagaaatatatactagatctttcacattttttctaaatacaaagggggaaacacattgaaaaaggggatcattcgctttctgcttgtaagtttcgtcttattttttgcgttatccacaggtattacgggcgtccaggcagctccggcttcttcaaaaacgtcggctgatctggaaaaagccgaggtattcggtgatatcgacatgacgacaagcaaaaaaacaaccgttatagtggaattaaaagaaaaatccttggcagaagcgaaggaagcgggagaaagccaatcgaaaagcaagctgaaaaccgctcgcaccaaagcaaaaaataaagcaatcaaagcggtgaaaaacggaaaagtaaaccgggaatatgagcaggtattctcaggcttctctatgaagcttccagctaatgagattccaaaacttctcgcggtaaaagacgttaaggcggtgtacccgaacgtcacatataaaacagacaatatgaaggataaagacgtcacaatctccgaagacgccgtatctccgcaaatggatgacagtgcgccttatatcggagcaaacgatgcatgggatttaggctacacaggaaaaggcattaaggtggcgattattgacactggggttgaatacaatcacccagatctgaagaaaaactttggacaatataaaggatacgattttgtggacaatgattacgatccaaaagaaacaccaaccggcgatccgaggggcgaggcaactgaccatggcacacacgtagccggaactgtggctgcaaacggaacaattaaaggcgtagcgcctgatgccacacttcttgcttatcgtgtgttagggcctggcggaagcggcacaacggaaaacgtcatcgcgggcgtggaacgtgcagtgcaggacggggcagatgtgatgaacctgtctctcggaaactctttaaacaacccggactgggcgacaagcacagcgcttgactgggccatgtcagaaggcgttgtcgctgttacctcaaacggcaacagcggaccgaacggctggacagtcggatcgccgggcacatcaagagaagcgatttctgtcggtgcgactcagctgccgctcaatgaatacgccgtcactttcggctcctattcttcagcaaaagtgatgggctataacaaagaggacgacgtcaaagcgctcaataacaaagaagttgagcttgtcgaagcgggaatcggcgaagaaaaggattttcaagggaaagacctgacaggcaaagtcgccgttgtcaaacgaggtagcattgcatttgtggataaagcggataacgctaaaaaagccggtgcaatcggcatggttgtgtataacaacctctctggagaaattgaagccaatgtgccaggcatgtctgtcccaacgattaagctttcattagaagacggcgaaaaactcgtcagcgccctgaaagctggtgagacaaaaacaacattcaagttgacggtctcaaaagcgctcggtgaacaagtggctgatttctcatcacgcggccctgttatggatacgtggatgattaagcctgatatttccgcgccaggggtcaatatcgtgagcacgatcccaacacacgatcctgaccatccatacggctacggatcaaaacaaggaacaagcatggcatcgcctcatattgccggagcggttgccgttattaaacaagccaagccaaagtggagcgttgaacagattaaaaccgccatcatgaataccgctgtcactttaaaggatagcgatggggaagtatatccgcataacgctcaaggcgcaggcagcgcaagaatcatgaacgcaatcaaagcagattcgctcgtctcacctggaagctattcatacggcacgttcttgaaggaaaacggaaacgaaacgaaaaaagaaacgtttacgattgaaaatcaatcttccattagaaaatcatacacactggaatactcatttaatggcagcggcatctccacatccggcacaagccgtgttgtgattccggcacatcaaaccgggaaagccactgcaaaagtaaaggtcaatacgaagaaaacaaaagctggcacctatgaaggaacggttatcgtcagagaaggcggaaaaacggtcgctaaggtacctacattgctgattgtgaaagagcccgattatccgagagtcacatctgtctctgtcagcgaagggtctgtacaaggtacctatcaaattgaaacctaccttcctgcgggagcggaagagctagcgttcctcgtctatgacagcaaccttgatttcgcaggccaagccggcatttataaaaaccaagataaaggttaccagtactttgactgggacggcacgattaatggcggaaccaaacttccggccggagagtattacttgctcgcatatgccggaaacaaaggcaagtcaagccaggttttgaccgaagaacctttcactgttgaataagaaaaagccctgccgaatcggcagggctttttaaagatcagtcagcaaacgcctcctgcaataatcgatacgatcggagcttatcttcaaaatgatgtgtgatggtcaccaccatgatttcctctgtttcatacgctttactcaaagctagcagccgctccttaacctgttctttcgtaccgacaatcattcgatttcgattatcagcaattcgtctctgttcataaggagaatacgtatttttccgaacagcttcatacgaaggaactccctctaaaggaataccctgctctcccgccaaaagtgtaaaatcaagcacagccccaagctcctctgccttctcctccgtgtcagcacaaagaacaaaaacagcaactgccgctcgaggcgtatctcctaacacagacggtttgaatcgtctcttatactgtctgacagtaccctctccgccctctccattgataaaatgggcaaacatatagccagcgccagattcagctgcgagcagcgcgctttctccagatgagccgagcagccacacatccggagccgttgaaatatgcggcgcagccgtcagattcggaaaacggtgtttatcatccgccaaatcatgcaaatacatggtcagctccttgatttgctgcgtatactgatcagcattgcgcttaccgccgtcattcagcgcccatgatgcaatcggcattccccccggtgctctgccaagccccaggtcaattcttcctggtgtcagcccctccagaacacgaaagttttcagctactttataagcactgtaatgcggcagcatgactcctcctgatccaacacggattcgctttgttttcgccgctatatgactgattagcacctcaggactggaccctgccagccgttttgaaaagtgatgctcagaaacccaaaatctcttatatccaaggtcctcagcagcttgggcaagcgcaacggtttgctgtaaggccgtttctgcattgctgccctctgatactggagattgatctaatatacttaatgaaaccatccctaccacctcatcctcatcgtatcactgatcttctactttttctccaaagccgctcacattgcttatcagtgtcccctatcattcgccatttatttgtgaaagcctgtccctatttgtcggaatatgttacacgtgaaacataaaaacccctccagacggagaggtttgctttagtttttattaaagcccttttctttcacgtagtcatttaaatacgtacgcggcttttgcttcataaagttcagtatttgatcggaccacgtttcttcccgctgcccgtttgttctttctctatagtaatcagaaatggttttgtcatacgtattcatagtatgacggaaatcgtctgtgttcacattatacgtattctcatgataaacggcctgctttggcaatctcggttttttgccggaaaggttcgcaggatggcctactgccagtccgaaaagcgggagcacatggtcaggcgtttgcagcacctctgtcaccttgtccagttcattccgaatgccgccgatatagcaaatgccaagccccatggattcagcggcaatgctcatattttgcgctgccagcgccgcatcaatcaagctaaccataaacatttctgtattctcgagcagctcagaaatatgttcacctttttcctcagccagtttttgatggcggtacaaatccgcacaaaatacaaaaaagtgtccgttcttctcaacgtaaggctgattcccagcaagcacggacagctcacgttttttctcaggatcagaaaccccgataatcgaatatgcctgcacatagctggatgtagacgcagcctgcgcacttttcactaatgtatcaatttcttcagctgtcaaaagctgatcagtaaaagaccggattgaccgatgattcaaaatggtttcgattgtgttattcatcacaaaaacctccttatcactttttatcatatccgaaaaaaagtgatctcaaaagcgaaatgctctgcacaaaaaaagacagcctctgtaaaggctgtctgcatattaagaattaaaaagataacttctgtatttcgtcagctgcacacttgcattatatacaatcccaaatccgattaacgtggaaagtgtcgagcttcccccatagctgacaaacagcaacggaatcccggtaacaggcataatgccgatgttcattccgatattctggaatgtgtggatcacaattaacgccgtatagccaacgcaaaagaaagaagcgaaacggttaaacggatgtattttgtctatcagaacaacaagcctgtagattaaaaagaagaacatgatgacaacaattgcacagcctataaagccaaatgactcacctattatagaaaagataaagtcagtcgtactctctggaacataaaccttcaaattagaaataccattacctaaaataccaccagatcctattgccatgatggcctggtcaacttgccagctgtcatttgaatcttcctgtgtctcatttgaagcagacacccaagaagtgacccgcttaatttgataatcctgtattccaactgatttagcaacgtcaggaaagtttatcattactaataaaattaatgaaatgagtaagatacctgaaccagctatgatcgcaatcaatttccaatttatacctgacataaaaaccattacaagaacgataaacatacatattcccgcagtcccagcatcctgcatcaagataagacctacaggaataactgcgacacccgcaatctttaataacaagtggatatcatccctaagcgtccgaactcctttaggattagcttttccaataactgaagcaagcatcataatcaaaccaaccttcataaactctgacggctgtattgttattctaccgatcctaaaccaactttttgcccctttaataacaggtgcaatagactcgggactgattttaagaataatcaaagataaaataccaatgataaaaatatataaacttaacttttcaagctgttctaaatcaaagtacaaaagaactgtaatggcaacagcccccaaaaaataaaacacaatttgctgaatccaatccgtgttcccatactgcccaaactgaccggcagcataaattgatactacgcttataataaaaaacacaccaaatataaaaatcaaatccccctggtaaaaggggctttgctgtttcttatatcgactcattctatcccgccttacattttcatcggaaaatcactaatgtttattatacatgaaccacgttcaagatgacacgtgaagctcgcttccttttatgttttttcagcatttgcggcgctttttcagctacacgaaatatgacgtatcataaaccgaaatgtttcgattgacacaaaacttttcaaatgaaaaaaacgccataccaaaagaatttgttaaaaaacgaatgcgataatgtgttatattcccaaataatgtgatacctcataagaaacagctaaaaattcagagccccatgcccatacattctcctagcacattaaacgaaaaaataagacgatagatccagtccatttctgcaaaaacacgtatcaatttctggaaaacatggtataataattgtaacagaatattcaaaaaacaatcacaaaacagacacaactcagttcctctatttcatttttgtaaacgttatcacaaaatgaaaggagacgggtatgatggacatgttttttgcttacttattggttgccagcgcaacgcctctctttatttggcttgataacaaaaaagtcgcactctcagctattccgccaatcattttaatgtgggtattcttcttcttttacgcaacagaaagcctttctccacttggacacactctcatgattatcttgtttgccgttaacgtcattgtcgctcatatcgccgcatttatcatttacggccttccgtatcttcgcagaaagcgaagcagctgaagacagcaaaaaaccctcttccaatgaagagggtttttgtattattcgttatggcctgaatgctctgagtgttcagcgcctccaggaggatttccgtccatatggtcaccatggtgatagtgagccgcgaaaatccagatggatccaagtacgataacgatcgcgccaaagaatccgaacagcgtgtttccgacttggatcgtgccgttttcgctctctgtcatatgcatgaacatgagaagctgcagcgccgcctgaatgaaggcgaagccgaagataatccaaagttttgctgatgagctcaggtcagtatacactgcaacccatagagccagcagggtcaaaacgatagacaggataaaacctacaatgtgtttccatggaaagtgactgtgttcagcagatttgtttgccattttacagacccccaatcccatgagatagacacctgtaaagatgaaaatccatacaacatctaagaagtgccagtacaagcttgagataaagattttagatgaagtttgcggagttaagccgcgtttcttcaactgaatcagaattcctgtgatccagaaaatcccgattgttacgtgagttccgtgagttccaagtaaaacaaagaatccagaccagaacgcacttgtactgagagccgctccttcatgtacatagtgaacaaactcgttgatctcgcatccgacgaagccggcaccgagaagaagagtgataattgtccaaatgactacgccttttaaacttccgcggcgcatttcatgaacagcgatcccgcaggtaaagctgctgatcagcagcaagaacgtcataatcattaccagattgacttcaaatagttcgtctggcaagacacctccagctgttctgtttttaagaacgaagaaggttgcaaatagtgttgagaacaacacaatttctgcccctaaaaagatccaaaacccgagaatattaagtctgccggtttcagattgatattccataggcgcgttagaattgccgtgttctgcatgttccataactcacgcctccttattcggaaatctttctttccgtctcttttatttcatcaacactaatgtagtagccgttgtcgtattcgaatgaacgcagaaccatgcagagcaggactccgatcaatccgactacgcccatccagtaccattcaaagacaagtccaaagcctgcaagaccgaaggcaacagacataaagaacggtctgcctgagttgcttggcatatggattttcttgaatttgctttcagggtataattcagttttttcttctttcatatgcaggaatgcatcttgagatttgacttcaggaagcaccgcaaagttgtaatgcggcggaatcgcagaagaagtcgcccaatcaagcgtacgtcccacaccccatgaatctccgctgatttcacgagtagagtaacggaagctgtagtagatgttatagcaaaggattaagaatcctacacccatcatgaaagctccgactgttgagataaagttcaatgttgtccagccgtcattcggtccgtatgtgtaaatacggcgaggcatgccttgaagccccaagaaatattgcgggaagaaacaaatattgaacccgatcataaagatccagaagaaccattttccgattctttcgttcagcttgtggccgaacatttttggataccagaaaataaatccggcgaaacaagcaaatacagtacccgcgatcagcacatagtggaagtgagatacaaggaagtacgtattatggtattgataatccgctgctgccatcgcaagcataacccctgtaaccccgccgataacgaagttaggaatgaacgcaagcgcccacagcataggtgttgtaaagctgattcggcctttatacattgtaaagagccagttaaagattttaaccccggttgggattgagattgccattgtcgtaattgagaagaatgagttaacggacgcactgttccccattgtgaagaagtggtgagtccaaactaagaaactcaatacagagatggcgataatagaaccaaccatcgctttgtaaccaaacaattgttttcttgcaaagcttgagatgatttctgagaaaataccaaacgccggaagaataacgatatatacttcaggatgtccccaaatccagaacaagttagcccaaagcatcggcataccgcctgcttccaatgtgaaaaagtgagcgccgaacaaacgatcaaatgataaaagtgctaatgctactgtaagtacagggaaagcaaacacgataataaccattgtgatcagtgttgtccatgtgaacattggcatacgcattaatgtcatgccttttgttctcatttttaagattgttaccataaagttgatccctgtcatcagggtaccgataccggcaatctgaagtccgaggaggtagtagttctcacccggcccagggctcatgtcgttacttgcaagcggcatataactcgtccagcctgcgttcggagaacctccgataacgaaagaaatattgaaaagcatcgcccctacaaagaacgtccagaagctcaggttgttcaagtaagggaacgcaacgtcgcgggcaccgatttgaagaggcacaacaacgttaataagaccgattaagaacggcatcgccatgaagatgatcatgattgtaccgtgagttgtaaaaatttcattatagtggtttgagtctaaaaaactgttattcggaagcgctagctgggcacgcatcatcagaccgtcgacaccgccgcggaataacataattacagcagatataatgtacatgattccgagttttttatggtcaacagtagttatccattcagaccacagccatttccactttttgaagtaagtcagtacaaaaataatggcaatggttgaaagcgcaatggaaacttgtgcgcccagaattaatgggtcaccagttacgaaaaattcgtcccatttgaatttcatgcaggcttcctcctttcctgatcaatatcattcttctgtatcatcagacttcttaaattcgtttttctttacgttttcaaacggatctgttttagagtgcggtgaaacggcttgatagccaaggcgtttgcgcgcctccatcgcgtactcagcgtcttgtccgtgatcaacgtatttcaagtgagtagaagagaacgttaattcgtccacattttcaggaagcatcaattcatcatacttctcttttgtcagcttaggagcctcgttctgagtctttttcacccagctgttaaagtctttttctgtaactgcattcacatcaaactcttggtctgcaaaatgttcacctgtgaagttcgcgttgcggccttcgtaagtacccactttgtcagcctgtaagtattgatccatcagcattcctgccatcgcatatttttgccctccaagctgaggaatccatagcgaagccattgaatctgcagatgagattttgaacaagatcgggcggtcgacaggaatgtttaagtagttgaccgtttcaatatcctgttcagggtagctgaatacccatttccagtctaccgaagtagcataaacaacaagaggctctttatcttttgttgcttcaggagctttttctaacgaatatatcgtctgtactgttggcacagaaagtgcaatgacgattaaaattgggatcactgtccagactacttctaaaaacgtgttaccgtgaatttctgggttataagatccattatctttgcctttacggtcgcggtattttactaaaataatggtaaatagaacaaagacgaccccgacgataaacagcataaatccgatagataacaggattaaatcactttgctgttcagctacaggtcctttcggatctagtactgaagcattgctgcatcccccaaggacgaaaaccacagttaacagcgctaatacaagcaacggttttaatgctctgaacaagaagatcaccatccttcctattgatgtaataaatctgaagtgcatacttcctcaaaatcttttctctactttgttatgctatcaaaaacttcacttattagctttatttttttataaacttcatcccattttcgcttaaatgtcataaaatcgacaaaaattgctccaactttattcacatctatcgcttaagatgaaaagtttctagttatttccgcatataagtaaagaaaagatgatgaagaactaattctgacaaataaaggtttaccacaataaaaaacttaggtcaatcaaaaatttcattttgttaaactttctagataggaattattttttccttgtctagcatcttttcacacggttaccattttaacgcatcaaatattgaaagaaaaggcgcaatgaagagccaatatgctctgaattgtccgtattttttaatgagagcatccagttgtttatcttatacaaaaaagaggaatgatataagcaaataaataaaaaataggatgtgttgcatgatgagttttcttatttcacttatcgtcgctattattatcggatggcttggaagcctgtttgtaaaaggagatatgcccggaggaattatcgggtctatgatcgcaggtcttattggcgcctggatcggacacgggctgcttggaacatgggggccgcacctagccggatttgccattattccagcggtaatcggtgcagccattgttgtctttctagtaagcctgttaaccagaaaaagaggataaaagcagcagcacccgaagcgtcagcgctttgggtgtttgttttgccataaaaatcgaaaaagcctcaaccctagcggttgaggcttttgactggtttggcgcccaactggtcgataaaccttctgaaggcctgttttccttctgttgtctgtttaaacacaccggcgtgttcaaggatgcgcgcgaatacatgtcccagctcttcttttatgactagatctgcattctcttttgttatggttcttttttccatcatccgattagcccactcactatgttttgccgtgagcggattttgttctaaagctgttttcggatcagcagagcatagcgccgctgccgtttctttcatttcctcctgtaagcggcccggcaatatcgccaatcccatgacctcaatcaggccgatattttcttttttaatatggtgaacttccttatggggatgaaatatccctaatggatgctcctcatccgtccggttgttcctcagtacgatatcgagttcatacaagcctcccctgcgccgtgcaatcggtgtgaccgtattatggggcgtatcgcctgtataggcggcaatgccggctttttcatcggaatacgtctgccacgtgcggaagatatggtcagcagcttcggcgacatgacccggttcgtctccttggagcctgagcacagacatcggccacttcactaagcccagcgacacgccgggataatcgtttaattcataaacgtcttccgcttctgcacgtgccattggaaaatcatgcgcgccgccttggaaatgatcatggcttaggatgctgccgccgacaatcggcagatccgcgtttgaaccgataaaataatgcggatattggccaagaaatgacagcagcctttcaaatgtttttttgctgatctccatcggttcatgttcaccttttaagacaatgcagtgctccggataatagacatatggcgagaattgcaggaaccattgttcgtcctcaaggatgaccggaatgattctgtgattttgccgggctggatgattcacgcttccctcgaagccgacattttctttacacagcaaacacatcggataatttgtctgttcctgctcttttgcagccgcaatcgctttcgggtccttttcaggctttgataggttaatggtcatttccagctcgccatattcggtcggcaccgtccaatgaacatttttggcgattctgtcagtccgtatataatagacatcctctgaatattgatagaattcctttgtcgcctgttttgggccgtataatgcttttgtctcttcaaatttgcgaatgacctcggacggggcaggcacaaaacagcccatcagctttgcgctgagcaggtcacggtacgtatctgtatccgcttccattcggccggtttcggcagcccatttatagatgggagctagcaagtccggcaggctttgtgactgcttgatgctggtgctggagttcggctcgggatgtgtgatgcccagcgcttcataaagacggtttctcgtatattcccgatcccagatcgaaatcaattttcgttccaggccatactcaagcagctgttccagatgttcaataatactcatatgtcactccccctttagttctctcgctccctctccgatatccgcgacataaaagtccgctcggagccctgttttttcttgatatctgtctccaaccttctgaataaaatcatcaacgaactcatcttttacaatgctgatggtgcagccgccaaagcctgctcccgtcattcttgatcctattacaccttcgtgatcccatgccgcaaacacaagctcatcaagttcagggcatgttacttcatagtcatccttcaatgagaggtgggattccttcattaactgcccaatttcatctatattgttctctttgaacatatgggccgtcttaatagcacgatgattttcgtatacagcgtgctttgcccggcgtctgttcgtttcattttggatcaggctggaatgcgcatcgaaatcagaaggcttgatgtcgcccagtgcggcaatatcgaggccttttttcagatcaagcaatgcatcattgcattcttggcgtctcgtattatagctcgagtcagccaatgtcctttttttgttcgtgttcgcgatgaccagcgcgaggcctgagacattgagtttgctatattcatagtcaagcgtgtcacagttcagcagcatcgcatgatgttttttccccattccaattgcaaattggtccataattccgcaattgacgccgataaaatcgttttccgcatgctgcgccattttcacaagctcaagcgcatctacttcaggatgaaaatagctttggagcacgacccccatcagcagttcaatagaagcggaagacgacagccccgccccgtttggaatattccctgaaaatacaatgtcaaagccatagggaactgcatatcccctctgttgaaattcataaatcacgccttttgggtagttcgcccagtcgtcttctttttgatagcgaatgtcgtcaaggctgcattccttgatcccctcgtctttaaagttgtctgaatacatccgaacaagcccgtcttttctttctgcaacagcagcatatgtacccattgtcagcgcgcacggaaagacatgcccgccgttatagtctgtatgttctccaatcagattcactcttccaggtgcgaaaaaaaaccgtaatccctctttttctccgaatacacttgcaaatatcccctttagctcttcccgcatgtgcaatcacctttctggtttttattttttattccccttatttctccatagaaaacggcagatcatatgctgcagtcctctcataccccttcttcttttgtttttttaaagacgagccatttgctcgcaacatagttgacgacaacaatgaccgcgttgtcgagtattttggccaaggtttcatttgtattgaactggccgacaagaatgatcatcatgcctaaatctatgccgagagacaggacccgaacgctgaaaaaagcagtgagctctttcagcaggctctgcagatcatgtgttttttgctgaaacacatataatttatttgttatgtaagcaaacagcacggacaaaatccaagcggcgacagtggcggctttgtaatccacattcatgatctctaccaatatataaaagctggcgatattcacaatggttgtgaaaacccccataatgatatacataattatttctctatacttcactgatgttcctcgctttctgaaaaacttttcaaaattcttggcctctcgtgctctctgtctaaagtaaaaaataccgaaagtgcgtctaaaaagctgcggaaggtggctggctggcccaatacatatgattgtttgatgattccgtcgaggactgcacatattattttagccgtatattcaggatcaatacaggcgtcaatcagctttctctccttcagccacttaatatataacacattttcttccacccacaattcgtacagccggacataggccttgcatttctttaagactttatatgtcggcatgttcatggcaaacgaggtgatgtcccacgacggcttatttatgtaataggaataaagcagttctgcagcgtgttttgcagcctcgtccaatgtcagcgatttcactgactcccgctccatttgatcaagataccctataatgatcttttttttcatctgacgtttttcgagaaggtacagcagaaaatcgtccttgctgacaaaatgaacataaaatgctcctttgctgtacccggcggctctgctgatatcttctacagaaaccggatcatacgctcggtcaatcaacaaattcacgccagcgtctataaaactttcaaatgttgcttctcttttaatttgaaatttgttttttttcatatttttctcctggcggtaatgattacccttatcttacaccggatcaatctttagcggtatttatttctttgaacggttatgctattcggtttcccaggggtcatttttaataggctaaatgatttattttcatttacatactatccagtcagtatttaattgtttattattataaataaggtccattggttatattagtcatttttttagggaataggtaggtggtttttccttcagtttgtgaacaccgagcaactatgtgtgaaatttgttgtactcgcctcatcatcgcgctggcttgtcttttattgcccgcatgttgcaggaaaacattttatacaattggaggttactatgaaaactcatgttaaaaaagatttggacaaaggttggcatatgttaattcaagaagctagatccattggattaggcattcatgatgtgaggcagtttttagaatctgagacagcatcgagaaagaaaaaccacaaaaaaaccgtccggcaagactagtccgaacaggcggatctatttacctctggcttttctatcacctgatctgagttttcaccatatcctctattcaaaagcaaatcgctgcgctgagcttgaggacaaacggtgtgtcagctaactacgacagacagccggtgatgcgatcacctcttggcacatgcattgtcataaagaggtgatgcgaacatgataaccgtgctctggtaaacagcagctttgctgagaacaagctgcattcggtgaggttttgaaagcaaactcgtttatacacggccgagcttgaaaaccttcgcctgtctttagaccactgtgttcacctcttcacgacttccttcttttttcatcctccagatattgttcaacgcataaatcggactttcagtacatacctattggtgtacctttttgcttacgtttagcgaataaaaggaggaaagccatgtacaaagctgattataaacagattgctgcaacgccgtcttttcaagcttttttaaagcagaaacgcgcttttattgttccttctgcgattttcttttttgtcttttatttttcactccctgttttgacatcttatttcacctttttgaatgcaccggccattggagctgtttcatgggcttggctgttcgccatcgcccaattcgctatgacctggatactgagtactgtgtattcccggagagccgctcatttcgatcagtatgtaagcgctttaaaagagggtctgaagggtgaacagacatgaatatgactgcttttttattatttttggcgattgttggcctgacgcttattatcacgtattttgccgcgaagcggacgaaaacgacgagtgagttttatacggcgggcggcgggctcaccggcgttcagaatggactggcaattgccggtgactacatgtctgccgcctcgtttctcgggattgccggaatgattgcgttatatggatttgatggcttcttttacagcatcggttttctggtggcttatctcgttgtcttgtacatcgtggcggagccgcttcggaatcttggaaagtacacgatggcagacatgattgccgctcgctttaaagaaaagaaaatccgcggtgtcgcggctctcaataccattgccatctctactttttatatgatcgcccagctcgtgggggcgggcgcgctgatcaaactgcttctagggcttgattatactatggctgtcctcatcgtcggagtgctgatgaccatttatgtcgtgtttggcggcatgatcgcgacaagctgggttcaaattattaaagccgttttgctgatggccggcacactcgtgatttcgattatcgtgttttcgaaattcggctttagcctcaataccatgtttgaacagatgaaaacggctactccgctgggcgctgattttttgaaccccggaaataaatacaaggtgccgcttgagaccttgtcgttaaacttggcactcgtgctgggaaccgccgggcttccgcatatattgatccggttttataccgttaaggatgccaagacggcccgtacatccgttgtgtcagcgacatggattatcggtgtgttttacattatgacggtatttctcggctttggtgccgcggcatttgtcggttttgacgcgattacggcggctgatcaagcgggaaatatggcggctccgcttttagcaaaagcgctcggaggagactttctgttcgcgtttgtatcagccatcgcctttgccaccattttggctgtcgtgacagggttggtgctgtctgccgcctcagcatttgcccatgatatttacagccagatcatcagaaagggagaagcaactgaaaaagaacaaatgaaagcggccagatgggcttctgtcgccgtgtcagtgctctcgattctccttgcgatttttgcacaatccttaaatgtggcgttccttgttgcactcgcgtttgcggtagccgccagcgcaaaccttccgctgattgtgtttacagtcttctggaaacgattcaatgcctcaggcgctttatcgggcagcctgacaggcctgatcagcgcgcttgtgctggtatcgatgagccctagtgtgtgggacccggctggaggtgctatttttaccggtgatccgctcattccgctgtctaatccaggaattatttccatcccgctcggctttctcggcgcgtggctcggaacggtgctgtcgtctgataaaacaattgatgaagatacgtttgcagaaattcaggtgaaggcgcatactggcgtccatatggaacaggaataaaaaaagctctctttatagagagctttttccttgtcttttcttctgttcttcagaaatcgctttttcaaatacatccttgccggcagcacctggaattacagtgtcgccaataataaaggttggaacggctgtgatgtcagcctcttcataggcgtgcttcaaggcttggcgctgcacgtcctgatatgttcttatttccagtgctgatttgaatgatgcaccgtctaatcccacttcctcggcgagcttcgtcaagatgtcaatgtcgccgatattttggccctcctggaaaaacgcctgaaagacacgggtgttgtattcatgtcctttatggtattccttcgcaaaatggaagccttcaaacgcgaggtctgtatacggatggggcgagacgtttggaaaattgatctcgacccctaatttctccgccattggctgaattgatgtctgccacatgtactgtttggaagggtcattgaccggatcaagctgaggagatgggcttggacgcagttcaaacggcatccactcgacttcaacatcctttccttttatcgcttcttcaaaagcggcttttccaacgaaacaaaatgggcagacgtaatctgaataaactttaatgtgtactgtcatgataatctcctttcgtataaattgattttaaactgtaacaattaaagttacaactgttttttaaataaagaagccgataaggcttcttttatgattccagcaaacgctgggcaatatattctccttttttgcagccgcctgggcatgcatataaagcagaaccgattgtttgtgtatattcgtttaacgcatcctttgctgaaagagccttcagcatcgggataaactgattgtcgggatttttttgaaaactgataaacagaagacctgcatccatatagccggttttcggatcaagtccttctgtgtaagagaaagctcttcgcaaaatttgttttccagtagatttcgctagactgacgtgtgaattagacggaatttgattcagcttcacgggatctgtttcctttttctgtccgaaaggcgcccccgagctttttctgcggccgaaggtatcctcttggtccttgagggaagagcggtcccatatctcaaggaacattttgattttccgaaaagccatataggtgccgcccgtcatccagtcaggctcaccagactgaatccacacgatcgagttcatcaagctgtcatcctccgtgctctggttgcctgttccatctttgaacccgaagaggttgcgcggtgtttcaccattttttcctccgcttaaaaagcctttgttcacaaagcggacctcacaagtgccgaccgcttgatttagcaggttacgcagcgcgtgaaacgccacttgctcgtcgtctgcacacacttgaatgcagatgtccccgcctccctgcttttcatccaggttgtcattgggcatcgctggaagagcggctaggtgcttcggttttttgcttttcagcccgaaacggtcctttccgtctttttcaaaaaagccaggcccaaatccgaatgtgaccgttaagttggaaggggataaatcagcagactcacctgtatcctgcggcggcagatattgatttctctgctccgctgacattttcttgccagacgtcagcatctgtgtgagacttgtccagtttctaaataacgtaatgatgtcgcttttgtcttttgctgttacatccagtgcagcaaaatagacatacgtctgatgggcagttgtgattccggcctgatgctttccgtaaaacggaacaatctgctcctcctctttttcatcctttttcgatggcttagccgcagtctgaacaagtggagcgagaccgccgagtccgctggcaccgatcgcaacggctgcccccgccattgcccccattttaaaatgtcccgtctgtgaatttgttctgactttttttgttcatcgctcatgctgttacaaaactccttttatagcacattcgcaatcttcgacatggtttcagaaagagtcgtcagctttgtgctcagctctctgatttgcttttcacttaatttatcataagacgtataggactgatcatttgttttgtattttgccattaaaacttcaaattcgctgaactccgtatccagtttttccgtcaagtcggagtgatcttttacaagcgcgcttttcactgtttgataaacggcttcggagccttccacatttgccataaggtcgactaaatcgattcgtgagtagcgctcttcttctcccgtgattttcgaaatcccggcttcgttcagaagctccatcgcgcctgctacaatttgttcaggtgttaatttcagtgattgaattgaaccgtcaagctcttttacatccttgagaagctggtcagctgttgccttttccccggaaatatcttgatccttccaaatggccttctcaagcttatggaagcctgtccatttgtctccttcttcaacatcgttttctcgagcatcaattttcggatcaagatctccgaggctttcagcgatcggttcgattcgctcgtaataaacacgcgctttcgcatataacgttttggacttttcgatatcgccggatttcacagcacccgtaaatgcttcagtcgctttgacaagctggtcactctgctctttgacatagcctttatactcatccgctgcttttgccagctgatcgctagcctttttgccgctcttcttcgcttctgtcaggtcttctaaggacgctttcagtgactcggattctgtcttgatttttgctgtatccggtttgtctttttgcgcttctgtgtagattggctgaagatgcttttcgatttctgtatattcgaatggatagtcgctgcgaatatcgttttcaaaggaaagccagtagctgtttaactctttccccttcttttcaatctctttttggtctcctttttccgctgagtcattcagcttagaaatgatggtttccattttatttacggatgcggtgatttctttagtgatcccgcttttttcagatgaagctttttctttagttgaagatgtgtcgttggctccgcagcctgcgcacagcgcaaggatgcatccggctgatacagcgatttttgtgaaattcattttgtcagttcctttccgtttgtaaaatgttttgccgcttctgaaacaagcgcaatcagtaaaaagaggaaaatcaacatttgcggaatcgtgctgtacacagacggataaattcctagcaccgatacagacggcagccagctttctgcatcagacggaagaatgcccgccagttgaaggctgtgaacgccggttccgagaaatttcacgcacatatacaggacaaccgccattgatagaagaaaaaacggcttcaatggaatgcgcattccgagcttgatcatcagaacaccgacgatgacgagaacgataagccctgcggcagttccgccgatcagttcagtgagcgggagcttcccgacaagcccgatgaaaaagatgaccgtttcgagaccttctcttacaactgccagaaatgcaatgagcgcaaaggaaagcaggcttcgtttttttagtgcctgtgacttctggatattgattttttctctccatttatccattgaggcgtttctgtgcaaccacaccccgacatacaaaagcatgacagcggacagtacgccggtgacgccgccaagcaagaaattgttttctccgaatacactggaggagaacagaaccgtgacaccgatgccggctgctaaggaaacagccatgccggcagacgctccgccccagatccatgccgaggagcgcgtgacccgcgctttttttgtcatggttaatagtgctccgatgacaaggagggcctccatcccttcacgaatcgggatcagcgccgcatcccaccagctgtagctgcttgaagcgatcggctcgagcaattgaatcatttcgtcaatttgctttgataccttttcgggatggctgccgatctccgccttcatcagtgccagattttcctccgatgtcgtataggcttctttcgattgggacacgacgtctccctctacggcgagccaggatgtaactaaattgtcgattgcggatgacgcttcatccaattgttttttttctatgaactgttttgtgtctttcaagctttgtatataggctgttaaggacgcccttgattgacctgaggatgtctttttcagcacgacagcctgctgataggtttctaaatgagacgcaagctcttcaagctgtgttttgagcttgcctgcgtcttgattgataaaagaaagagaaatcatcgcgatattcgcgtccatttcactgtgagaagaaaggttttctttcttaatagaaggttcttcttttttccacttcgctttgaaggtttcaaacgtttgttgtgccgaatccatatccccgtcttttacggatttgatcatttgcttgtttaattgaattaatgcggcgatcggatcatcttccgcatgtgccgcagaaccgaaaaccatcaacaagctgaatagaataagtgccagcccccgagccatcatgttcctcctataattgaaaatgattatcattgtataacataatcatagccagttcttgtcctttgtcaattaaaatttgaaggtctgaaaaccttgatggacagcaaaaaagctgtccttttacagaacagccttttgaaggaagatgaacgattatctttctgttttatatgtttgaatttcctcacgaaacttgcgtgcagcactctcaggatcttccgcctgactgatggcgctgatcatactgacgccatcggcccccgcttggataacaggtgcggcattatctattgtgatgccaccgatgccgacaattggaatgctgatgccttggcggcgcactgcttcaataagagataccccttgtaccgctctcgtatcttttttcgtttcagtcggatagatcggcccaagcccgacataatcggctccgtcttcttcagcttgcttcacctcagacatcgtatgggcagaaacgccgagaatcatatcacctatggcagctcttacctctttcgcatttgcgtcttcctggccgatgtggataccgtcagctttcagcttcagagccaattccacatcatcattgacaatgaacggaataccagcttcacggcaagctgcctgcgctttttcagcaaattcaatccgagcctctcctgtcagcgcatccccgcctttttcacggaactggtacagggtggcaccgccttttaacgctttttgtacaactgtaacaggatcggctttcgtattgtttgaccccataatgaagtatacagataataactctttcatcatttcccgagaaatacgagtcatgagacagtcaccctttctatagccgcccattcttggacgtcttgttcagtaacagttgaaagcttgttcagcaattcaatctgaaagcttccagggcctttgtcagccgtctgctgtgcggcaagctgagcggcgaccccatacgaagtaatggccgcaatagcagcaaacaatggattttcttccacagcgcaaaacgcaccgacgacggaagtcagcaggcaaccggcgcctgtcacttttgtcagcagcttgtggccgttatgaagggtgtatacatgtgatgtgtcggcaatgacatcgacttcaccagtaatcgcaatgaccgtgtttagcttttgtgccgcttgctgagccagccggatgatgtcgcctccgccttcacccgcatcaacacctttgatcagccaatccgtcacaccgacggtatgggcaatttccgccgcatttcctctgattgcagcaaggcgaacctcacgaatgatgtcacgtgccgattcagttcggaacggtgttgctccggcaccgacaggatcaagaatgacgggaacgccatgttcattggctgatttccccgcgatgatcatcgcttcgactgactccttgctcagcgttccgatatttaaaacgagtgcacccgcaatcttcgccatatcggcgacctcttcttttgcgtacgccattacgggcgatgcgccgagcgcgagcaggccgtttgctgtgaaattcgttacgacattgttggttatgctatgcaccagtgggctgtgccggcggacagcagtaagacattttgctgctgattgtgcatccatgtttgcatcatcctttactatcttttttcgggtcccataaatacgatttcgtatgttcgagccaagctctggcggcaaacgacaagtaccggtcctttctccaaataatggcgaggtgccaagggatgaccggatcgacaagcggaatgactttcactttttccgggtcaaggccgcggcagatccgttccggcaaaagcccgatcccaaggtttgctgataccatctcactgataaaatcccattgtgatgtttcataaatgatatggggccggaacccagccttgatacattccgtcataattcggttgtgcaggacaaaatcctctctgaagaaaataaaaggctcgtccttcaactcacgcagctgacattctttctcatcagccagccggtgggaagggtgaacgacaagcattaaggtttcttttacgattgtaaacgaatgaaagatatcttcgtttgcgggaaggaccacaacgccgatatcaagagagccgtccccgacaccttcttggacttttatagaaccgtcttcgactagctgaaaggtgacattcggatagttttcacggaaatcgccgagcactctggggaaaaaccccgatccgatcatcggcggcagtccaatccgtacgtgccctttcttgacttccataatatcatttaattctgacgtcaggttttgaaatgatttaatgatttcctgcgcctgcacatacatgctatgaccggcatcagtcagttccacctgcctgccgtttcggtaaaacagttcaattccgagctcttcttctaaatttttgatcatttttgatatcgtcggctgagatacataaagggattgggaagccttcgtaaaactttttaaacgggcgacttccaagaaatatgttaaatggcggatatccatgtgcttcaccctttctatagacaaaaggaatacttcttattcttaatatatattttacctatagagagaccttatgtacaataagtatataagggaggcatcaatatgaaaaaactgttgctaaccgttattcaaatcgctctgttatttatatttgctcggctgattaattgggtgacagcccttcttcatataaatattcccggcagtataatagggattgtgattcttttcacattattgcactttaacattatcaagcttgaatggatcgagcttggtgcagcgtggcttctcggggagctgcttttattttttatcccgtctgccgtcggagtgattgaatacggagacattatgtcgaaatttggtgtcagcattctgcttgttgtcatcatcagcacgtttgtcgtgatggtgtctacaggaacgcttacacaactcattgcaaagagaaaggagaaaaagcatacgtgttcatcggaattgtaagtttgtttttaacggttttggtgtatttaggagcaaaaaaggtatatcaacgctttccgcgtgtttatacgtcgccgctattggtgacgcccgctgtgttagtcggtctgctgctgctggtgaatgtcccgtacgagtcctataatctcggcggcggattgctgaccgatatgctacagccggccaccgtggcattcgcgatcccgctatataaatatttccctgttttaaagaaatacgcagtggaaattattttgaatgtggccgtcggttcatgcatcgcgattatttctaccgctcttattgcgaaatggcttcacctcggcaccggcttaattgacagcctcgtcccgagatcagtgacaacgccgatcgcgatgaacgtatctgaaatgatcggcggaatgcctgccgtcacagccgtgtttgtgattttaaccgctttgctcggcacagtgatcggcccgatggtcatccgctatttccgtattgataacgaaatcgcgcggggcgtgctgctcggcacaagcgcacacggagcgggaacgtcaaaggcatttgagctcagctctgtgtccggcacgatttcaagcgtatcgatgatcttagctgcgattatgacgctttgcgcggcgccgtttttactttcatttatgtaaaaaactgtcctctcgagggcagttttttttatgtgcttccccttattgaaaagctcgcaaattacaatataatgtaatttgtggataccaaaggaggcaccctgatgcacaacttgcaggtgaggcggcattacgccgcgttaaaaggattttatttgtttgcttttctcggtacgggcagcatgattcccttactcagtatgtatttaacgaaggaacagcatttaagcggatcacaggtcggcttgatcatgtcactgggcccgattgtgatgattttctttcagccgttttggggcatgctcagcgactatacgcaaaaaacgaaaggcctgctggcggtttgcacatcaatcacaggcatcattggattagcctatattgcatttgacagtttccctctgtttattttgattgcggcctgttttgcagcctttcaaagcacgattattccactttcggacagcatttcactaaggtacacacaagaaacaaatggcaactacggcggaatccgcctgtttggttctctcggcttcggtgtcgcggtgtttgccatgggacaggtgacgaaccagctgtaccccattcacgtgatctttatctttggctgtgcctttctatgcattgctgccatattggcttcacaaatgcccggccagcagaaaacaacaacaaaagtcaatatccgcaaaggattccgggagcttatcagcaacaaaactttcctcatctttatgatcatcacctttacgacatttgctccaaacttagcgaacaatacgtatttcagtctttttctggacaaaagcggcgcgtcactttccgctatcggcattttatttttcatcggtgtcatttcagaaattccatttatgagattcgcccaaacatttatagataaaatggggctgctcaacgtcattatgctgtcaggcggagtctcattattcaggtgggcgctctatttcacggcgccttcactatggatcatttatgtgacggtctttcttcagggagtggccatcggtttatttatcccggcggcgcttcaatatgtgaaaaagattaccccaagacacgttgaagcgacagcactgaccatgtacgccgccatcggcaacgggttcggcaactggttctgcacatttgcaggcgggtatatttttgactacgtatcgattttcgcagtctacttgctttttggcattctgagcatagcaggctttggcctgacattatatttaatgaaggctgaaaaaaacaaacatacacttcatcagccggctgttacttttaaaccataatgactataatgaacaaaagaaaggatgtgcgttatgaacgggcaagagcgaaacagcatttcgaaagggttgcaggttgatattgtattgaaagcagatcaaaaaacaggaaaactgacgagagggacagtgaaggatattttgacgaaatcaagctttcatccgcatggcattaaagtccgtcttgaagatggccgcatcggccgcgtccagcagatcatttctacataaaaaaaagctgcccctgaacagggcagctttttcattattttttctgcagaaggaccactttcaggtagttgccttccggaaatgccgaaatcgttttgaaatcctccggcagcgtaaattcctcaatgatggtgtagcgttcgttcgtttctttaaaggcggcatcgataaagcctttgaatttcttcatgccaaaggcgctgctgtttgtagaggcaacaatgacacccttgtcagcagtgatggcgatcgtttccttcagcaggtttttataatccttggccgcgctgaaggtgcgtttttttgtgcgcgcaaaggaaggcggatcgagaataatcagatcaaagcgcaaatccttttttgcagcatatgaaaaatagttaaacacgtccatcactttaatgtcgtgcgcttcgtaatccagcttgttcacgctgaattgctcgatcgttttggccagacttcggtttgccacgtcgacgcttgttgttttctccgctccgccaagcgccgctgccacggagaatgcacccgtataagaaaatgtatttaaaacggttttcccttttgcatagcggtctctgatcgccttgcgcacatgtctctgatccaaaaagatgcccgtcatggcgccttcattcagatccaccgcgtattgaatgccattctcctggatgatgatcgggaactcgccccttctccctttcacgaagtcatcatcttcaacgtattgtccagccgtgtcgaagcgtttcttctcgtaaatcgctttataatcaagatccagctcatccaatgcggaaatcagcatgtctttaaaggtgtaaattcccttgctgtaccattgaatcagcaggtagccgtcataatagtcgatggtgacgccgccgacaccgtcgccctcaccgttgaacaggcggaaagctgttgtatcttgagcctcaaatagtttggcgcgcgcttgggccgcttttgttaatttggtgagaaaaaatgcctggtcaacctgttcatgtttattgcgggtaagcgtccagccgacccctttgttttgcaggccataatagccccgcgcgagaaactcgccgctctcagacacgatatcaacgaggtctccttctttcatgtgccccgcactccctgcgagagcttctttttcaataaggggatagcctttttttattttggcagcgtgtgctttttttagggtgagtagcttcatatatgtcgtcctctttctgtttgctttctcttatcgtaccacaaaacgccaagatgtctgcattgacagaaaggaaaggtttttctacgatagacaaaaagagtttcgaggaggagcagcatgccaaaacgaattgaccatacaggcatcatggtaagagatattaacgcgtccatcacattttatgaagaggtactcggcatgaaattgaaggatcgcatcacacacacgaacggtgtaatcgagcttgcttttctcggctttgaagacggcccggaaacagaaattgaactgattcaaggctacagcagcgagcttcccgctgaaggaaaagtgcaccacattgccctgctgactgatgacatcgcggctgaatatacaaaagcggaaaaaatgaacgcaaaatttatcgacgaggagatcacaacacttccaaacggataccgttatttctatatcgaaggccctgacggtgagtggattgagttctttcagcggtaaaaaaaaagaacgtacattttgtgatgtacgttctttttttatctataccaactgatatacgttgactcatcgcaaatcatagcttcccagcccatacgctcaaccaattcatggatgtttttatctttggctaaaaagacattaatgaatgagtcatatacactcataaacacaaaatccattttctcatcagttaaaacgagctctgctgcggcttcatcaagaaccgtccgcaagttggcctcagttatgtccaaaacgccgcggttttccacaatcggttctgcgtaataaaaccgattggatccgttcgcacctaatacctttaccaaactcggaatatgaaaatttgaaatatgatcctcactgggataatagaggtctccatttatgttttcatgtaacacctcagccaaatcctctctcgcgaactcgtcccttaaagcgcctatcgacgtcattaaagccagcgccagctcagcatgtgtttgaaagccgcaagaagacataaccttcttccaggaaacagccttgcctattcctcttatttcatcatcgtttggataaatatgctcgtaatcattttttctttttgcattctcccatccttcaggcatttggataaaaggagaaaagataagtgcagcagatgagtattcaactggtacttgttgtaagattggtgattcgtcatctaaccatatataatctagcatgcgcacctcctttacatattctaacattctctttcgtttaaaaggagatgatcagccctatgacaggctgatcatctatcacatcacatttttatccccagattcaaccgcactctcttcccgccatttttgatgatcccatattctgaaaaacggatagtagatggcacaggtgatcagcagattcaccagctgcataacggcgcccgacacctttccgcctgtcgccaggtaacctgatatgagcggcggcatcgtccatggcaccgcgattccggccggtcttgccaccagcccggtgctcatgccgatataagtcgcggtaatcgtgaggagcggtgcgatgataaatgggacaataaggagcggattcatgacaatcggcatgccgaaaatgatcggctcgttgatattaaatagcgcagggccgattcctaatcgtccaagctgcttcatttgtttgctccgggagcgcacaagcatcgtcaggacaagcgccaacgtcgccccgcttccgccgacattgatccaaatttgaaaaaactgagtcgtaaaaatactcggcaacgcctcgcccgcttggaaggcaagacggttggcatccatcgcgccgtaccaaatcggcgccatgattccgccaatgatggaagccccgtgaatcccgcacgaccaaagcagcatctgcacaaattcagcgatcaggcttccgccgagactgccgccaaggatggaaagcggtgtcccaagcaggtctcctacgacattgtgcagactctgaaaaggtgtcatttcaatcaaaaggcgcgccagccacacgagaaacacaatgataaagccgggaatcagcgcgacaaacgatttgcttaccgcaggcggcacaccgtctggcattttgaagacgatatttttttgaataatgtaccgatagatttcggttgaaaacaaggcaatcagcatggcgacaaataagcccttgctgccaagtagcgtgatcgggattccgccccctaccatgatggactccgttgagccatccggtgtaaacggcacctcaaacggcgttgccaatagaaatgcggcaattgaaatcgctccggccgaaagggcatcaacaccatagctttccgccagccgataggcgatcccgaaagcggcgatcatcgccataatatcaaacgaagcattgacgggatatccgagcttatcagcccactccttcccaaacacactcgccatgaaatcagcataccccggaatcggcaggctcgttaaaatcaagaagacagacccgataataatcagcggcatggtcaggataattccgtcacgcaaagcgctgaggtgccgctgtccggcaattttcccggcgacaggcattattttttcttccattacccgagtgaatgcgctcatcttaaaagcccccttttcacattgctttgtgaacaacctccgcaatgttttctttatcttattttgaaaacgtttacaaattcatttggaaaatttcctcttcctgcggaaaaaatctgcattttgccaaacaatcctgtctatgaaaaattttttccttctaactattaatctctcttttttctccgatatatatatcaaacatcatagaaaaaggagatgaatcatgaaaaacatgtcttgcaaacttgttgtatcagtcactctgtttttcagttttctcgccataggccctctcgctcatgcgcaaaacagcagcgagaaagaggttattgtggtttataaaaacaaggccggaaaggaaaccatcctggatagtgatgctgatgttgaacagcagtataagcatcttcccgcggtagcggtcacagcagaccaggagacagtaaaagaattaaagcaggatcctgatattttgtatgtagaaaacaacgtatcatttaccgcagcagacagcacggatttcaaagtgctgtcagacggcactgacacctctgacaactttgagcaatggaaccttgagcccattcaggtgaaacaggcttggaaggcaggactgacaggaaaaaatatcaaaattgccgtcattgacagcgggatctccccccacgatgacctgtcgattgccggcgggtattcagctgtcagttatacctcttcttacaaagatgataacggccacggaacacatgtcgcagggattatcggagccaagcataacggctacggaattgacggcatcgcaccggaagcacaaatatacgcggttaaagcgcttgatcagaacggctcggggatcttcaaagtcttctccaaggaattgactggtcgatcgcaaacgggatggacatcgtcaatatgagccttggcacgacgtcagacagcaaaatccttcatgaggccgtgaacaaagcatatgaacaaggtgttctgcttgttgccgcaagcggtaacgacggaaacggcaagccagtgaattatccggcggcatacagcagtgtcgttgctgtttcagcaacaaacgaaaagaatcagcttgcctccttctcaacaactggagatgaagttgaattttcagcgccggggacaaacatcacaagcacttacttaaaccagtattatgcaacaggaagcggaacatcccaagcgacaccgcacgccgctgccatgtttgctttgttaaaacagcgtgatcctgccgagacaaacgtccagcttcgcgaggaaatgcggagaaatatcgttgatcttggtaccgcaggccgcgatcagcaatttggctacggcttaatccaatataaagcacaggtaacagattcagcgtacgcggcagcagagcaagcggtgaaaaaagcggaacaaacaaaagcacaaaccgaaatcaacaaagcgcgagaactcatcagccagctgccgggctccgacgccaaaactgccctgcaaaaaagactggataaagtacagtcatacagaaatgtaaaagatgcgaaagacaaagtcgcaaaggcagaaaaatataaaacacagcaaaccgttgatacagcacaaactgccatcaacaagctgccaaacggaacagacaaaaagaaccttcaaaaacgcttagaccaagtaaaacgctacatcgcgtcaaagcaagcgaaagacaaagttgcgaaagcggaaaaaagcaaaaagaaaacagatgtggacagcgcacaatcagcaattggcaagctgcctgcaagttcagaaaaaacgtccctgcaaaaacgccttaacaaagtgaagagcaccaatttgaagacggcacagcaatccgtatctgcggctgaaaagaaatcaactgatgcaaatgcggcaaaagcacaatcagccgtcaatcagcttcaagcaggcaaggacaaaacggcattgcaaaaacgattagacaaggtgaagaaaaaggtggcggcggctgaagcaaaaaaagtcgaaactgccaaggcaaaagtgaagaaagcggaaaaagacaaaacaaagaaatcaaagacatccgctcagtctgcagtgaatcaattaaaagcatcccatgaaaaaacaaagctgcaaaaacggctgaacgccgtcaaaccgaaaaagtaaccaaaaacctttaagacttgcattccaggtcttaaaggttttttacattctaagaacatcgtacacaacctttttcccatccgcctcacaggcttttcatactattgctatacagccatgaacagcataaaatgaacgttattacagttatcaccacatatggcgggattgtgactgggcaggcaggcaagacccaatgatgcaaagggagtattaatgcctaaaaagcagggcattttaactcttcttttcgtgttgggctcataacggcgccttggacaaccccctattctcatgctccgtcgtcgcgtcgacgcgggcatttttgtcattttcagccgatatttctcacttttttcattttgattgtcaacttttcatttgatacgatgaacaagccgacttttcttcagcaaaggaggttttgattgcttgcataaagagattgcaaaagaattactgctgctcgcaggaggaaaaaacaatattatcagcatcagccattgtacgacccgtcttcgttttgatgtaaaggacgagacgaaaattgatatacatgccattgagaacctgcaaggtgtgcagggcacctttttccgttatgggcttttccagattatcttcggagcaggcgtcgtcaacaaaatatataaagaagtcgttcatgtatgggagaacgcgccttctgaagaacctgtccaccagaaaaaagccagccggaagctgaaccctgccgcagcttttgcgaaaacactgtccgatatttttgtgccgattattccggcaataacagcaagcggcctgctcatggggctgatcggcatgattaaggtgtttcactggttcgctgccggcagcccatggattaaaatgctcgacctcgtgtccagcacagcctttattttactgccgattttagtcggcttcagtgccgcacggcaatttggcagcaacccatacctaggggcagtgatcgcggggcttttgacgcatcctgatctgctggacccgtctatgctcggcagcaaaaccccgtcttctttagacatatgggggcttcatatcccaatgatgggctatcagggttccatgataccgattcttctttccgtttttgtcatgagcaaaattgagaagctattaaaatcgattgtgccgaagtcgcttgatgtcgtgatcattccctttattacggtcatggtgacaggatgcctcgcgctgattgtgatgaatcccgccgcgtccatcatcggccagatcatgacacaatcgatcgtctatatttatgatcacgccggcattgccgccggagctcttttcggcggcatctactccaccatcgtcctatctggattgcatcatagcttttatgcaattgaggcaacgctgcttgctaatccgcatgtcggtgtcaactttttagtgccgatatggtcgatggcgaatgtggcccaaggcggagcggggcttgcggtattcctcaaaacgaaacaatcaagcctgaaaaaaattgcgctccccgcttctctgaccgcgtttttaggcattgttgagccgattgtattcggggtaaatctcaaattgatccgtccctttatcggagcagccatcggcggtgctattggcggagcatacgtggttgcggtacaagttgtggcaaattcctacgggctgacaggcattccgatgatttcaatcgtgctgccgtttggcgccgctaattttgttcattatatgatcggtttcttgatcgcagccgtctctgcttttatagctacattgtttctcgggtttaaagaagagacagaataactggatttattcgttttcattcataaaacgggggatgaaaggacaaaaaagctatgaaaattaaaagaatcttaaatcataatgctatcgtcgtaaaggatcaaaatgaagagaagattctcttgggtgcaggaattgcgtttaacaaaaagaagaatgatattgtcgatccgtcaaaaatagaaaaaacctttatcagaaaagatacacctgactataagcagttcgaagagattttagaaacattgcctgaagaccacattcagatttctgagcaaattatctctcatgccgaaaaagagctgaacatcaaaatcaacgagcgcattcatgtcgctttttcagaccatctttcttttgcgattgaacgcctgagcaatgggatggttatcaaaaatccgctgctgaatgaaatcaaagtcctttatccaaaggagttccagatcggcttatgggccagaacactgattaaagataaactggggattcacattcctgatgatgaaatcggcaatatcgccatgcatatccacacagcaagaaacaatgccggcgatatgacacaaacgcttgatattacaacaatgatccgtgatattatcgagattatcgaaattcaactgtctattaatatcgttgaagataccatctcttatgaacggctcgtgacccatctccgctttgccattcagcatatcaaagcaggcgaatccatttacgagttggacgcagaaatgatcgacatcattaaagagaagtttaaggatgccttcctgtgtgccctaagcatcggcacctttgtgaagaaggaatacggctttgagtttcctgaaaaagaattgtgctacatcgccatgcatattcagcggttctaccaacggtcagtcgcacgctgagacaaacaaaaaacgcttttgatcatctcaaaagcgtttttttatatctgtattattggttgatcgccgggttgctgatcgtattccacttcgtataggacatgtaatggaaatactcatcgcgatacggatgttttgtattggagttccaaggcttttctccgccgcagaagtgcacgattgccgggttttctctcgtttcattatattgcttccgccctaacagagtcgatggggttttcagctttaacatgatataggtttgagcgttccagcgcggatgaagttcataccactgatcatataaaatcgcattcagtgcatcttggtcatgcagcacaagaaagtcttcgtctgggtgttcattgataaagttgatgactttttctgtgatgttttgctttctccaagactcaaaatcaataatcatgatacctgagttaaaatacttccctgtatcagtgacgttcatttctttcaggcgttcatgctgccccgcatcctcaacagcggctacggtgtatggcgcaatgtctaagtcccatagcttagaaatatcctctaggacaagcgcatcacaatcgatgtaaatcattcgtttgatgctttcatccttaattaagtcgggaatcgaaatgcggtaatacgcggcttttgtaatatggctgctctctaccgcatgttcatacattttggtatccacttctaaaaactcaatcggcactccgaatttcaaagtggtttcttccagtctttttttgttatcaggcttaattccgccatcaatgacgtataattttacctctctctcctgatccatgttagtcaataaagaaacgaacatcccacctaaatgacgagcataattatcatctgcgcatgatacgatatgcatgatttcatctttcctcaatggtattcatctccctttttgttgtacaagttacataccctttttcaaaaaaataaacacgttctccgacatttttttaaacagaatgtgtgatacaacaaaaaaggtgtcattttttgaagatgcgataaagccagtaaagaatgaaaaagcttgcgattgtgatggcttcagccgagacgatataccacggccatggcccgagaacatctaagagagaggatccgcccggttttttcgtcaaatacatataattcgcgccaagccagcgatcaatcaggaaaatacagacgccgtacacattaacaagcaggactgtcacccataacgagcgctggcccattctgtaggtgccaatcacagccatcagcagacaggataaaaacacagacccgtgagaaataaaaaagaggatatatcggatatgcggaaatgaaaacattccgaggtcaggagtggcaagagcctgaatcgaactgccgatgccgacaaaaaacaaaaacacaaacagctttctgctttttgtcactaacataatagctgacaaatacaccgacaggtcactaagctggagaggcaatgaagtgcgcaccgaccacctgcccgtggcgaccaaccatatttgatagccgatttgcgaaccaagcaaaagaaacacaaacagagaacgcaaaaaccggctggccctcggctgcttgaccccctcttggaacaaaaccaacagaatggccaaaagggcgataatcgctaacgtcactacatgctctgtcgaaaacagatgaaacggatcatgcttatagacggattgaacatatttttgcaaaactgcacccccgtttgcggttttttgtttattttggcgttgtttgggctttttttattcaaccgatatatgggcttgaagttcacatcatcctctgttacaattcgtttcatagctaatgattctgataatttaaggcaggtctaaaaaatggaacgttcacatcaacatcagcagcttcggaaggaagaacacgatacactttctaagctcaaacaaatgcccgtcgagtcactcaacctggaagccatttcgatcgctacgaatctgtatcggtctgcacaaaggctccgtgtcaaaatggagactgaggttctttcttcctataacctttcttggaccgctttctccattctttatgatctatgggtatggggagcgctcgaaacgagaaaaatcgctgagctgtcagggatatctacagctacagcaagcaacgtgatcaaaacgctcgaaaaaaagagtttttgccgtaaaagcatcgacacaagagatcggcgactcgtgtttgtctcaatcaccgattccggcaaacaagcgatcgaagaactctacccggagtttcacaaaggggaaacagagctcattgcgggaatgacgaaggacgaacagaaaatattgacagggctgcttagaaaggtagctgacaatcttcatacaacataagctttgacgggaatccagtagcggtttgtctccctgtttcagagagccggcggaaggtgcgagccggcacacagcaaacgtgaattacctccccgagctttctttgtgaccttaaaagtagcaaagaacgggaaaccgttattcgaatgagcggaagacgatgtcttcaaccagggtggtaccgcgtgcattgagccacgtcccttatcgggatgggctcttttttgtgtttgtaaaaaaggaggaaaaatgatgaaaacatttgagcagctcacagcgtcacagcaaaaagaggtagaaagacagcttcagctatacatgacaggcgcccacgaagtcataccgccggaggaattaaaggcaaagctcgtgaaatcaatttccacgggcacgccgcttaaaattaagctcggattagatccgtctgcaccggatgtacatttgggccatacggttgtgttaaataagcttcgccaatttcaagaaaacggccacattgtccagctgttaattggggatttcacaggaaaaattggtgatccgaccggaaaatcggcagccagaaagcaactgactgatgaagaagttcagcacaatgccaaaacctactttgagcaattcggaaaagtgcttgatccagaaaaagtcgagcttcactataactcaaaatggctgaaaacattgaatctggaagatgtcattgaattagcagggaaaataacggtagcccgcctgatggagcgcgacgactttgaagaacgcatcgccatgcaaaaaccaatctcactgcatgaattcttttacccattgatgcagggatatgattctgtcgttctcgaaagtgatattgaattaggcggaacggatcagcatttcaatgttctcatgggacggcatttccaagaacgatacaacaaagaaaaacaagtcgtcatccttatgccgctcttggaaggcttggatggcgtcgagaaaatgtcgaagtcgaaacacaactacattggcattaacgaacatccaaacgacatgtacggaaaaacgatgtcactgcccgacagcctgatgaaaaaatacatccacttggcgacagacttagagcttgaagaaaaaaaacagctcgtaaaagacttagaaaccggcgcagttcatccgcgtgatgccaaaatgcttttagccaaaacaatcgtccgaatgtatcacggagagaaagcagcagaagctgccgaacactcgtttaaaacagtctttcaggaaaacagcctgccggaagatataccggccataaactggaaaggtgaaaaaacgatagcgatgattgatctgctcgtcaagctaaagctcctctcttcgaagagcgaggcgcgccgcatgattcaaaacggcggtgtacgcatcgacggagagaaagtaacagatgttcacgccaaagcagagataagagagaatatgatcatccaagtcggcaaacgcaagtttttaaagctccaatagtctgatattccgaaacgcttatgacccttcattcataagcgtttttttgcaggtataaagcagtcttttcaaaaacgctctccatcttgcaggaaactcctttagcatcccgaaatattccccaaccatacatttaggggaggtttatttttgatgaaaaagcttttgactgtcatgacgatggctgttttaactgccggcacactgctcttgccggcacagagtgtcacccctgccgcgcacgctgtacaaatatcaaatagcgagcgcgagcttccattcaaagcaaagcatgcgtactctaccatttctcagctaagtgaagcaatcggccccagaatagccggaactgcagctgaaaaaaagagtgccctattgatcgcctcatcaatgagaaaattaaagcttgatgtgaaggttcaacgattcaacattcctgaccggcttgagggaacactgtcttcagcaggacgcgatattcttctccaagcggcatccggctcagctccgactgaagagaaaggactgacggccccgctttacaatgcgggattgggctatcaaaaggactttaccgctgacgtcaagggcaaaatcgccttgatttccagaggagacctgacttattacgagaaagccaaaaatgccgaagccgccggagcgaaagctgtcatcatttataacaacaaagaaagcctcgtgcctatgacgccaaacctgtcgggaaataaagtcggtattccggtcgtcggcattatgaaagaagacggcgaagcacttacccagcaaaaagaagccaccttaaaactaaaagcattcacaaaccaaacctcccagaatatcatcggaatcaaaaaaccaaagaacatcaaacatccagacattgtgtacgtgacggcccattacgacagtgttcctttttcgcccggagcaaatgacaacggctcaggtacctctgttatgctggagatggcgcgtgtcttaaaaagcgttccatctgataaagaaatccgctttatcgctttcggcgccgaagagctcggcctgctcggctcctctcactatgtagatcatctatcggaaaaagagctgaaacgaagtgaagtgaacttcaacttagacatggtaggcacaagctgggaaaaagcgtctgagctgtatgtcaacacattggatggccaatctaactatgtttgggaatccagtcatacggctgctgaaaaaattggatttgacagcctgtctctgacacagggaggatcatctgatcatgtgccattccacgaagccggcattgattccgccaactttatttggggagacccggaaacagaagaagttgagccgtggtatcatacccctgaagactcgatcgaacatatcagcaaagaacgcctccagcaagcaggcgatcttgtgacagccgctgtctatgaggctgtgaaaaaagagaagaaaccgaaaaccattaagaaacaaatgaaggcgaaagcatctgacatttttgaagatatcaaataaaaaaagacggcacttgggtgccgtcttttttttataatgatcagctgtttagccgtctataagtaaagctttcagtttatcaactgtattttctttttctaacgggcgataaatggtcagtttcaaatcaggagagtcatatatttgtaatgtcatatgctccatcaccattgttccggctgccgggtgatgaagtactttttctcctgcgtgtgtgcctaatacttcgtggtggttccaccattttttaaattccgggcttctttcagttaactcatcgatcagctcttttatccatgcttccccaagaaaccggctggctgtcgatcgaaactgtgcgataagttttttggcgtggctttcccagtcgtcaagcagatcccgatactccttcgaggtgaaacatcgccatatggcattcctttccttactgcccatttggccaaaattgccgaacacagcacaagctgctgtgttccaagcaataacgtcccacttttcgtcagtcacataaacagggcaattggttaaatgatcaataaagtgccgcacagccagaggaaggctcttattatcttcatcctgatcatctaaaggaacatgatggccagccaacagaaagacatgacgcttttcctcataattcaatttgagcactctcgatatgctttccagtacctgtgttgatacccgaatatcccttccctgctccagccatgtgtaccatgtgacacctataccggacagctgggctaattcctctcttctcaagcctgttgttttccttctggtacccataggcaatccaaactcttgcggagaaagctgtgcccttttcagttttaaaaactcccctagctctttccgtttttctgccatactgtccacatacacactctccttttgcatagaatttcctattagtattctacataaaaaggagaaggtttttatattatttgtttcgttctccaaatacttcagcggccacaggaagaatggtattcagtgcattcggaaaacctgagtaaataatcatctgcatcatgacttctatgagttcttcttgtgtccatccgacattcagggctccgttaatatagaattttagctgctgggtattgcccaatgcagtcaatccagcaacggttgctaataatctggatttcagatcaagacctggtcttgaaaaaatctgaccgtagttaaactccacggcaagcacaccaaggtccggagcgatggaatgtttaaaattgtccacgatcgcttcatagttctcctcatcaatttgtttcagaatatctaacccttttttataacgttcacttgttcgcatcagcttctatctcccttccaatatcgcttttttagtagtacggtttatggtaatccttgaactgaaggcaataccgaccatgatcatccccaggatacaaacaccgttccaatgaaacagcatccagaccgcaccccctgcatacgatcccaaggcgccgcctaaaaacgtgctgaccataaagaggccattcaatctgctcctcatttcagccgacaattggaaaatctccgcctgacacgccacctgattcgcctgaatgcccatggtgatgaataaagcgcccaatacaatcacaatcaatgaagtctggcctgccattaataaaacaaatgacaataaggtaaaagacatacaaagcttgttggaaaaagcagctcctttttgatcaataatccggccgatcagcggagttgcaaaagccccgccaattcccaccaaaccgattgttccggcagtctggctgccaaacgagaatggaggttcactcaccataaacactaacgtcgtccaaaataaactgaaggcgccgaacatgaagccttggtttacacatgcttttcttaacactttctccttgatcaaaagcggaaataatgaagaaatgagttttccgtaatgaaatgcatgtgtccctttgcttttcggaaagcagaagtgaatgatcaacataatgatgacggctgctgcacaggcaatccaatacatcacgcgccagccataatgggcatctatcgccccgctgaccactctcgcccctaaaattccgcaaaccaagccgatagctacgtttccgagtacttttcctctgttcctgtcatttgctaaacctgccgcaaacggcacaaggatttgaggaataatcgtgaagaatcccaataataaatttgtgatgactagccatggaaagcttacagctaacgctgaagctgccgaacaaacccccactaagaatagcaggctcacaattaagcggcggcgttcaaaaagatctcccaatggaacaagcagaaggttccccgccgcatagccaatctgcgccaatgtagcaatcattccagcttgtgccggcgtcatatgaaacgtgcctgccatgctgacaagcaatgtttgattgatatagacattggctaccgtaaacccgctagtcaccgcgataagaaaaatcaaacctctcgataatgaaatggaatggttcatgtttacctcctttcttcatgcatgataaagcaggttcaatcatggaaacagaagtgagtttatactggtataaaaagtactagcaagcaaagcaaaaaagcgaaaccctgtcaggcttcgcttttgttatcaatccacttctttcttaatccccagcattttctcatctaggtaatgggcaatctccgcggcttccttcagctcatctgttaattgcttaggaacgtcattgttcaatttatagtaaattttatgttcaaggctcgcccagaaatccatcgcgattgtccggatttgaatttctgctttgacgtattccacacggttcgttaaattcacaggcatctcaatgattaaatgcaggcttcgatagccattcggtttgggtgtctggatataatcctttacctttacgattctcaaatcttcatgctgcttcaacacattcacgacattataaatgtcagaaataaaggaacagatgatgcgcacgccggcaatgtcgtgaatatgctccttcatttccttcgtcgtaatctcacagccctttctcattaacttattcacgatgctttcaaagcttttgacacgggattttgtatgttcaatcgggttgtgtccgtgaatgaggttatattcctggctgataattgagaactttgtatcgagcgcatctagcgcaaatttataaactaataattcatttttccaatcttccattactgtttttaaatcgtccatatgtgttacagataaatccattttcgtcatctcctttaacggaactttatccgctgtccatgtactagacgtccctgtctgctgcaaggttctatgaatttttttacaaaatgcggtcgattgtaacaaaaaaagaccgcacgaaacgagcggtcttttttattatcggaaatagctgatcaataatccgatcgagagcaggaatccgaaaaatgtatttgtttgggctgttgatttcattgcgacaatcatattcatcggcatttcgttctggacgaaacccttcactgcctgaaccggcttaggcacgctcaaaaagacgacaaacagccatgggcttgcggcaccggtaataaccaagccgacaacccagatataagcgacggcaaacgacgcagctaacagagtaacagctcccttatgccccatcaaaatcgccaatgttttgcgtccgccttttttgtcctcttcaatatcacgaatgttgttcgacaggttaatcgcgccgacaagaatcgcaatcgggatggaaatcaaaatgctttgcgtgttgatcatatctgtctgaatgaaaaacgaaatcagcacaaacaccgaacccatgcaaatgcctgagaataattcaccgaacggcgtgtacgcaatcggcagcggcccgcctgtatacaggtagccgatcgccatgccgacaaggccgatcagtgcaagccaccagctgctgcttgcacaaatatagacaccgagcaaaatggcaatcccgtatgaggcaagagctaattgcaaaatcgttttaggcttcattccgtggcgtacaattgcccctccgattccgactgattctgctgtatctaatccgcgtttaaaatcatagtattcattaaataagttcgtcgcgatctggatccataggcaagaaaacagcatagccaaaaacagcagcagatcaaccttcacataaaacatcgccaaaacggttccgagcagcacaggcacaaacgatgcggttaacgtatgaggacgggttaactgccaaaggatctgccccatgctttctttttgcggcgctgtctgaccctcacccttatttgtttggttcatcttcctcttcctttctattaaaaggcttactttttttcagccggcagcttaataaaaaactccttttgcttccttatctatcataatgacttctcccttatttcacaagataccgcaagaaggcgttttctttcttattatacgcttctcgccctgatttcattaggtttctgctttcacttgaacgaacaggtacagaaaaatttttttaagtacattacactttttaaaagttaaaaagatcttttgactccagctatcttttcctttattatgaatcagctcgaaacattccattcttgcccttgcaggtataaagattcattttcaaaaacatacgccgatatattaatttgagggagattagggaaaaaatgaaactttttgagcatctgatcgtcaaataatcatgtgattgtcgaaaaaacgggaagggaatttttgatatgctgcaattaatgaaacagctgtatgaaaaacccgctgtcaagtggacatgtcatacaggcttttatttgatgatactgcttgttttgttttttatgtatggttttcacaccgcgaataccggttcatatatttataacgatttctaattggagagagaataactatgaaacttttacatgctattcaaacacatgcggaaacttatccgcaaaccgatgccttccgctctcaaggccagtcgctcacgtatcaggaattatgggagcagtctgaccgcgcggctgccgcgatccaaaaacgcatttctggggaaaagaaatctcctatccttgtgtacggccacatggagccgcacatgcttgtttccttcttgggaagtgtcaaagcgggacatccttatattccggttgacctgtccattccgtccgaacggattgcgaaaattatcgaaagctctggagcagaattgctgatccatgcagcaggactctcaattgatgcagtcggccagcagattcagacagtttctgcggaagaactgctggaaaacgaaggcggctctgtcagccaagatcaatgggtcaaagaacacgaaacgttttatatcatttacacttccggaagcacaggaaatccgaaaggcgtgcagatttccgctgcgaaccttcaaagcttcacagactggatttgtgcagactttccagtcagcggaggaaaaatatttttaaaccaagcaccgttctcatttgatttgtctgtcatggacctatatccgtgccttcaatcaggcgggactttacattgcgtgacaaaggatgctgtgaacaagccgaaagtcttatttgaagagctgaagaagtccgggctgaatgtgtggacatcaacaccttcctttgtgcaaatgtgcctgatggatccaggtttttcacaggatctgctgcctcatgcggacacatttatgttttgcggagaggttcttccggtttctgtggcaaaagcgctgcttgagcgttttccgaaagcgaagatttttaatacgtacggcccgactgaagcgacagtggctgtcacatcggttgaaattacggctgacgtcatcagccgcagcgaatcgcttccagtgggcttcgccaaaccagatatgaacattttcattatggatgaacagggacagccgcttcctgatggagaaaaaggagaaatcgtcattgcagggccgagtgtaagccgaggctaccttggtgagccagagctgacggaaaaagcgtttttctctcatgaaggccagtgggcataccgaactggcgatgccggctttattcaagacggtcagattttctgccaaggacgtttggattttcagattaaacttcacggctatcggatggagctggaggaaatcgagttccatgtcagacagtcacagtacgttcgctctgctgtcgtgattccttatcagccaaacggaacagttgagtacctgatcgctgctattgtgcctgaggagcatgagttcgagaaggaattccagctgacaagcgctattaaaaaagagcttgccgcttctcttccggcatatatgatcccgagaaaatttatctatcaggatcacattcaaatgacggctaacggcaaaattgaccgaaaacgcattggcgaagaggttcttgtatgacgccttacagctcgtttttattctttatactgcttggcattcttcttctgccgacgatcattctcggcttaaacggaaaaagatttcaagcatacaacatgttcatatctatcattatattggctttaattttttcgcatgacttacacggggtcatcgcgctgtgcctgtttacaatatggcaggtgctcctgatcagcggctatctggcataccggcagaaagcgaacagcggctttgtcttttgcggggctgttatcgcgtctattctgcctttatttctgtcaaaaatatggccgtttctttcacacccgcagccgcatcatccgccgcataacctgatcagctttttagggatttcatatttaacctttaaaggcgttcagctgattatggaagcaagagacggactgctgaaagaacagctgccattgcaccgcctgctgtatttcatcctgtttttcccgacgatttcctccggcccgatcgacagataccgccggttcgtcaaggatgaacagaaggcttggacgaaagaagaatacgccgacctgttgtatacgggaatccataaaatcttcatcggtttcctgtataaatttattatcggctacgcgatcaatacgtacttcatcatgaatcttcccgcaatcacgcacaataagattcttgggaacctgctgtacatgtacggctacagcatgtatttattctttgatttcgccggctacacgatgtttgccgtcggggtcagctacattatgggcattaaatcaccagaaaactttaataaaccatttatcagtaaaaatattaaagatttctggaatcgctggcatatgtctctgtcattttggttcagagattatgtgtttatgagattcgtattttggatgactaagaaaaagtggatcaaaaaccgtatggccgtctcaaacatcgggtatttcctgctgtttatgctgatgggggtttggcacgggctcgcgccgcaatatatcatttacggcctctatcacgccgtgctgatgacgtgttacaactttttcgagaagtggaataagaaatataaatggctgccgtccaaccgctggacaaccattctcgctattgtgatcacattccatttcgtttgcttcgggttttacattttctcaggaaaaccatttcatcaccaccattaaaggagattagaaagctatggattttaaacaagaggtattagacgttttagcagaggtttgccaggatgacatcgtaaaggaaaatcctgatattgaaatttttgaagaaggtttgcttgattcttttggaacagtagaattgctgcttgcgattgaaaaccgttttggtattttagtgccgatcactgaatttgaccgggacgtttggaatacacctaacaacattgtaaatcagctgtctgagttgaaataatgaaaaagcgttttttcggtccaattattttggcgtttattctattcgcaggcgccatcgcaattccatcttcatggctgacaggcttcatcaccgataagcgtgtgaaagagtcagcaacagccttgaatccgagtatgtttcaagggctatatttacaagatcagatgctcaaagatccgacatatcttccgatttacgggtcttctgagctttctcggctggacgagttccacccatctaattattttcaggtaaacaatgagggattcacgccataccttgtcggcaaaggcggatcccagtcattgattcattctttaaacttcgctgcccatatggatcagctgaagggcaaaaaaatcgtattcatcgtgtctccgcaatggtttattaagcgcgggtctgatgaacagcatttcgcgccgaactattctgcgctgcaagggcttgatttggcatttaacgatcagatcgatcctgaaattaaaaagaaaatgatgaaacgcatgctgcgctttaaggctgtgcaaaacgatgccattctttctgagctgtacaaagcaatggtaaacggccagacgtggaaagtgaacgcgctgaagccggcggcgaaagtgtattacagcatgctggaaaagaaagatctgtattattcaacgacagaatcatccgggccaaagcgctatatctcgcagtcagtaaaggataagtcatggtctgaattgaataaactggcggatcaatcgggcaaacgccactccggttctaacgattttcacatcgacaaccctgtctataaaaagctgaagccgaaagtgcctaagctgaaagggaaaaacaaaggaagatcgtatgcggtgtcaccggaatatggcgactttgaaatgatgctcgatatcctgaaggatgcgggcgcagagcctatgtttgtcaccattcctgttaacgggaaatggtacgattacacgggcttcccgaaaaaaggacgcactgactattacaaaaaggtaaataaacaaatcagagcgaagggcttccaggttgctgatttctcagggcatgaatatgacccgtatttcatgaaagacaccattcacatcggctggaaaggctgggtgtatgtcgataaagcaattgacgaattttataaaaccggaaaagtcacttcatcctgagcatctcataggacgcggctgcatatttcctgctaagatttgaaatagtaaagaaatcacagccaacttaattaagaggtgttacatccaatgaagatgacaggcaatacggttttaatcacagggggttctgctggcatcgggcttgaactggccaagcgcctgctggaacttggcaatgaagttatcatttgcggacgcagcgaagcacgtcttgcagaagcgaagcagcagctcccaaacatccatacaaagcaatgtgatgttgcagaccgttcgcagcgggaagcattgtatgaatgggctttaaaggaatatccgaacttgaatgttctcgtcaacaacgccggcattcaaaaggaaattgactttaaaaaagggacagaggatctttttgtggacggtgatgaaattgaacttaatttccaagcgcctgtccatttatccgcccttttcacacctcatttgatgaagcagcctgaagcggcaatcgttcaggtcacatccgggcttgcgtttaacccgttagctgtttatccggtgtactgcgcaacaaaagcggcacttcactcgttctcgcttacgctcagacaccagctccgcgacacgagcgtggaagtgattgaaatggcaccgcctatggtggacacgggcttaaaccaaaaatcacgcgataaacaaggcctgacgtaccggggcatttcatctgaagaatatgttcaatatttcttggacggcttgaaggaaggcaaacaggagattacaaatgaacgggttgaaggtcttcgggatgccactcgcgccgattatgacaggttattcaagcaaatgaacacgcaggagaattaatttctcctgcttttttcatatgaatttcttacaaatttgagcaaacctattgcgattatttgttgaaggtatacaatagaatataattattttcaaataagtttgataatataaacaatttaacagcagggagattgaccatgactaaacaaacaattcgcgttgaattgacatcaacaaaaaaaccgaaaccagacccaaatcagctttcgttcggaagagtgtttacagaccacatgtttgtaatggactatgccgcagataaaggttggtacgatccaagaatcattccttatcagcccttatcaatggatccggccgcaatggtctatcactacggccaaaccgtgtttgaagggttaaaggcttacgtgtcagaggatgaccatgttctgcttttcagaccggaaaaaaatatggaacgcttgaatcaatcaaacgaccgcctctgcatcccgcaaattgatgaagaacaggttcttgaaggcttaaagcagcttgtcgcaattgataaagactggattccaaatgcggagggcacgtccctatacatccgtccgttcatcatcgcaaccgagcctttccttggtgttgcggcatctcatacgtataagctcttgatcattctttctccggtcggctcttattacaaagaaggcattaagccggtcaaaatcgctgttgaaagtgaatttgtccgtgcggtaaaaggcggaacaggaaatgccaaaaccgcaggaaactatgcttcaagcttaaaagcgcagcaggtcgccgaagagaaaggattttcccaagtgctttggctggacggcattgagaagaaatacatcgaagaagttggaagcatgaacatcttcttcaaaatcaacggtgaaatcgtaacgccgatgctgaacggaagcatcctggaaggcattacgcgcaattcagtcatcgccttgcttaagcattggggctttcaagtttcagaacggaaaattgcgatcgatgaggtcatccaagcccataaagatggcatcctggaagaagccttcggaacaggtacagcagctgttatttccccagttggcgagctgatctggcaggatgaaacactttcgatcaacaacggtgaaacaggggaaatcgcaaaaaaactatatgacacgattacaggcattcaaaaaggcgctgtcgcagacgaattcggatggacgaccgaagtcgcagcgctgactgaaagcaagtaagaaaaagccggcccagtacaggccggctttttttacgcttcaattttgttgaaaaactgcggcagatacgctttgtgcgcctccagcatttcatctaaaatctgtttggccacagtatcggacgggacaagagggttaatcgtcatggcaaggagcgcagtttgatagtcacctgtaactgccgcttctgccgcgacacgttcaaaggatttgatttgctggacaaggccgcggacagacaccggcaagtcgccgacagcaattggcttagggccagttttcgtcatcacacagttcacttcaactgcggaatcgtctggaatactcgctattgcaccgttattgatcgtgttcaccggctgaatgtcgtgtttatcattgtaaatcgagctgattaagttacatgctgcatcactgtagtaagctccgccccgtttttccagctgcggcggtttgatcgcaaggtttggatctttataaagctcgaacagctctttttcgaccttctgtacgacttcagcgcgggtgccctccatttgtgatgcttccagttcgtgctccagcatctcttttgttttgaaatagtaacggtgatagccgcaagggatgacattgagcgcttttaagaaatccggttcccattcggcgcctgagatatttttcatcgtcatcgcgtttttcgggtcgcccatcgcctcgatgacttgctccttcacacttacgccatccaagaaaacatccagcccaaataccatatggttcagtccggcgaattggacttctacgcggtccacatctacatcaagcgctttggctacgcccattttgatgccgattggaacattacagagaccgacgactttcttcaggttggagtagcgaagcaaggcttctgttaccatgccggcagggtttgtgaagttaacaagccaagcgttcgggcaaagctcttctatgtcctttgcgatctcaaggatgaccggaattgtgcgcaatcctttaaacaggcctcccgggccgtttgtttcctggccaatcactccgtattttagcggaatgcgctcatcctttgctcttgcctgcaaaagtccgacacggaattgggtcgtgacaaagtctgcgtctttcagcgcttttctccggtcgagcgtaagatgaatgtcgatcgggacgccagctttttcaaccatccgtttggcgagtgtgccgacaatattcagcttttcttcgccctcggggatatcgacgagccataattcgcgcacaggcagctcatcataccgtttaataaacccttccactagctcgggcgtatagcttgaacctccgccaatcgttacaatcttcaatccttttgtcatatgcttgctcccctttgctcggtgattttttcatataactcaatgatctctgcagccatatccttcactgtcattgcattcattaaatgatcctgtgcatgaaccatcagaagcgtcatttccgtcttttctccgctcgcttcattttggatcagctctgtctgataatgatgggcttttgacaattcttcagcagcgtcttgaagctttttccgcgcttcttctgcgtcaccgcttttcgcagcggcaatggcctccattgcggagctcctaccgtttcctccgtgaaggatgatttgaaaaatgatttgttccatttcctcattcacgcgattcacttcctttctctacagagccgcttctttgtcatctgatgctgcaggcgtttggaccagctccagatcgttttcttctttcagcttctgcttatcccacattctgaagaatggatagtagacaacaaaggacacggcaatattaatggcttgcatgaccgcacctgagacttttcctcctgtcgccaagtagcctgaaaagatcggcggcatggtccacggcactgcgatacccgccggttttgcgacaaggccggtgctcattccgatgtacgtaagtgtcactgtgacaagcggtgtgatgataaacggaagtaagagcattgggttcatgacgatcggcattccgaatataatcggttcgttaatattgaagatggccggtccgaccgcaagcttcccgagctgcttcatttgtttgcttcgggcgcgcaggaacatcgtgacaaccagtgccaatgtggcgccgcttccgccgatattgacccagatatcgaaaaattgctgggtgaaaatcttaggaagctcctcaccggcttggaaggcgatccggttggcatccattgcgccgtaccaaatcggtgccatgacgccgccgacaatgtttgcaccgtgaaggccgcaggcccataaaagcattttgacggcttcggcgacaaggcttcctccaaggcttcctcccagaatggaaagcggagtccccaataaaacgcttacaatattatgaaggctttcaaacggtgtcgcttcaacaatcagccgggctgcccaaatcaggaagatgacggcaaagccggggattaacgcgacaaatgacttgcttaccgccggcggaacaccgtccggcattttgaagactaaattgcgctggataatgaggcggtaaatctctgtggacaccattgcgataatcatggcgacaaacaggcctttgcttcccatgagcgaaagcggaatcccgccgccaaccatgatttctttcgtcgcgccatccggcataaacggcacttgataaggtgttgctaataaaaatgccgcaagggaaatggctccggccgacaaggcatcaacgccgtatttctcggcgagccggtaggcgatgccgaacgcggcgacaagacccataatttcaaaggtcgcgtcgactgggtaggccagtttttcagaccaggagctgccaaacgtttttgccataaactcagcgtatcccgggatcgggaggttgccaatgatgaggaaaaaggaaccgatgataatcaggggcatcgtgaggataataccatcacgcagcgcctgcaaatgacgctgtcccgcaattcttcccgctataggcatgaccttttcttctaagatctgattgactttattcacatagcccgcccctctctatgacacatgtccaagctgttcagctgatttcagcacttccgccccgttgcacgtgccataatggacggtattaatgacgtctaccggaaccccctttgactctcctaattttttgagctgcggaagcatgtaacggacttgcggaccgagaagcaatacatccgctttatcgatatgattttgtacagaatcgcctgaaactgcccaaatggtatagtcttttccctgttcctgcgcacttttttccatcttgctcaccagtaaactagtagacatgcctgctgcacaaacgagtaatatattcatgtaaaagaccccctagagtttgatcaattttgtaatgtcctgctgttgctatcatcatattatgaaatcgctttcataaacactcagggtttttccgcaggcaacggaaaaaaggtatatacaggctgtcagctcagcattttttggtcaaacacatccgaaagctcttgaaatgaacggcatttgaccagctggttcaccgccgccgggtcatccaaaatgctgccaagcagtttatacatgctttgcaagtccgctttgttctccttttcgacacaaagcagacagacaaattgaactcgctgactctcccaatcgatcggttttttgagcgtacaaacggcccaaaacgttgttttcgtctgcggaacaagcgggtgcgggatggcaacaagattgccaaaacacgttggcgacatgtcttctctttcaaaaatggaatctatgatttcttcatcggcaaagccgcattcgaccgctttctgccctaaaaattgaatcacttcttcttttgagcgcagatcctcctgaaaaaaaacgagttctttttttaggtagcgattggctttttccttttcatcactcagaatagattctatttttgtaaagtcagttccgcctaagatggtgttaaccttcagtactggtacagggagctcttttttaatcggaatggtactgatgacaaaatcaattgattcgtaggacatttgatcaagactataatactcagccgttccaagaatatcgagccgcttgccgaaatgggaacgcagtttttcgcgcagaagctgggcgcttccggcacccgatgcgcatacaatgatacagcgtttcggcggactttctgttttttttcgttcaatcgcggcgccaaagtggagagccaaatatccaatttcgttttcatgaatctcaatacccgtttgttcctttatcacgattccggcaatgatcccggcttcaaaagcgagtggataatgttccttgatcgctgccagcatcggatttcgaagattcatgccgtatcggttgcggctgatcgccggcttcatatgcagggccaagccgattttcagctctttgtcatgcaggatgccaagcttcagttcacgatcaacagctttgatcatggcaagtgtcagctgatcggtttcctcttctattgaaaatgtgtcctctccgcattgtgattgtgtcattcgttttgtgccaaggagatgcatggtgatgtaggccgtctcgtctttcggaaacgtaacggcaagctttgattccagctcttttacgatggcttctgcagcctggtactccttttgatgcaggatatgatccatatctttcgggaaaagagaaacatagttttccgttctgatccgtttacaggcgatagcgatatggataatgaggttattcagtcccatgttggacagagggatgcggtcgtttttcatttttttcaagatggcggaacggatgatctcaatttcttcttttggcaaaatatcagccttttcatttaaaacatctatctccgtttctctttcatcaacaatgtactccgccatgcagtacctcatctgcacctcgtccccgcgcagcttgaagccgtaattcggacgtgtttccatgacgatgcggtaaggcagcagacgtttctttacttcctttaaatccgtttggagtgtagattttgagataaatagttcttcagcaagttcatcgagcttgagataatggtccgccagcagcagacgtttcataagataggccattctctcctccggcaataccggcaggccctttttttgctgaaattcatcttgcagcagtgttctgaatacttgctcgtcatcaatgcggagcttgtagccggagcctcttacagattgtacaaaggcaccgtggccgcttagcacaccttgaagttcctttatatcattgcggactgtccgcgtcgttacgtttaattgcgcggcaaaaaacgaacttgtcaccggggcttcagccgccatcagcaagcgcagaatatcacgtagtcgcccatgaagcatgagaaaaacctcctaactagtagatgcagggattcagtgaataggcagaaaggatgatgaagggatgcgaaatgtatataaattctataatggagagaatggcaagtcaatgaacatccggaggactagagggaaaactgacctataaaaaaacagccgggatcagccggctgttctagatgcggacatattcttttgtttagacgccttgcggtccttcatgatttttcgaacaatcgggtaaatgaccggcgcccatttgataacggttttgatcatctttttcaaagctccgattctcccttcttttttctcaaccattcccctgattgcctcttccttaaacatgctaacgcgacacgtacctgtttcccgtcacccagaaacgccatggataatcgcgtgcctccccgctgttgtcaatgccgatgcgcgggccggttgaaattgcttccggtgtgtacccgctttcgatgtaaagcggctgttccgtgatccagcgtccgtagtcattcatcgtgacgccaagcgctttcgtcagctttcctggtccgtttgtccattccctcggactcctgcccggccttctctcctccattaacagctggccttcatgcggctcaatcgccctgattaatactgcttgcgggacatcctcttccgccgcaacgacattcagcaatgtatgggtgtgcatcacgtatgtatatacccgcccagcttctgcaaacatgatctcagtccgcttcgtccggcggttgttaaagctgtgggccgctctgtctccagcccccatataggcctctgtttccacaatatagcctgacgctgtgccttcgtctgtttcttttacaagaaggcagcccagaagcgatggggcaagctcaagagcggttttttgataaaacgtgatgggcagcggatttttttctctcgtcacgaatcgacctctccttttaccgatttttgtacattgtaccattcccgaagcagatcaaaaaaaacggctgttttaaaatctttccattcagggaatattgttaccgttcaaaaaaggagggccaaccattgaaagatgatcatcaaaacaagcagcaccaatcaaatgcccaagggagcgaggaagcgttttctcataagacatccgggaaaaacgagtcagaggataccttaacgaataggcaggggcatcctgttactgacaaccagaatgtgagaaccgtcgggaatagagggcctacaacacttgagaactatgattttctcgaaaagatcagccacttcgaccgggaacgcatcccagagcgggttgttcatgccaggggagcaggtgcacatggatattttgaagcgtacggaagcttcggagacgaaccgatttcaacatacacaagggccaagctctttcaggaaaaaggcaagaaaacaccggcatttgtccgtttttcaactgtgaatcatggaaaacactcgcctgaaacattgagagacccgcgcggttttgctgtaaagctatatacagaagacggaaactgggatttggtcggaaacaacctgaaaatcttttttatccgcgacccgctgaaatttccggatcttgtacacgcatttcagcctgatccagtgacaaacatccaggatggtgaacgtatcttcgatttcatttctcaatctcctgaagcgacacacatgatcaccttcttgttttcgccttggggcattccggccaactaccggcaaatgcagggttcaggcgtacatgcctataaatgggtgaatgaggagggcaaggccgttctcgtgaaataccattttgaaccgaagcagggcatccgcaacctgacacagaaggaagcagaagagattcaagggaaaaactttaaccatgccacacaggatttatatgacgcgattgaaaatggcgattatccagagtgggaagtgtatgcacaaatcatgagcgatgatgagcatcctgaactggactttgatcctcttgatccgacaaaactgtggtataaagacgattttccatggaaaccgatcggcaaattggttctgaacaaaaatccggaaaactaccatgcggaagtggagcaagcttcatttggaacgggggtgcttgtcgacgggcttgatttttcagacgacaaattgctccaggggcgtacgtttgcctactctgatacgcagcgctaccgtgtaggcgcaaattacctgcagcttccgatcaactcgccgaaaaagtatgtcgccaccaaccaggaaggcgggcaaatgcaatatcgggtcgatagagcagaaggacaaaacccgcacgtcaactatgagccatccattatgggcgggctgaaggaagcgaagcaggacggaaaagaccatacgccgcatgtcgaaggcgatgtaaagcgtgaagcgattgacagaacaaacaacttcggacaggctggagaaacgtaccggagatttactgaatttgagcggaacgaattgattacgaatttggtgaatacgctttctacgtgccgaaaagaaattcaggatcaaatgattgagaatttcacaaaagctgatcctgactacggaaaacgcgtagcagaagggctaaaaaaggtttccgaaaacaacagcaacgggccgatcggcacaactgaaacggaacaggctgcaaagcaggctgaacaggagagccatccatctaatccgtattaacaacagcgaacagggctttttttgaagccctgtttttttatttttctattgaaacgttttcaacaattgtgttgtactggaaggaaaggggtggagagatacgatggaattacagcaggacttgattcctcagaaaaaaacaatcggcgccttagatcacgccgtttttttatgcatggtattttgtttctggttttcaggctatatttacgttcctgtattcagtctgtatttggaggatctgcacttttcatatggcgcaatcggcatcattctcggcagctacggggtcacgcaaatccttctgcgattcccgctcggccttgtgtcagacatcctgttttccttgcgcaagcaattgttaattgccgggttcggcttttccgtcctcagcagcctgctttttctgatgtttgattctttcttcttcgtgctggccgcccggcttttcgcgggaatcactgcttctatgtgggtgatggcgaccattttatacgcacattatttcaacaatggcaatgcatcaaaagcaatgggcatcatgcagttttttaccgtcatgcctcagtttgccagcattgtgttctgcgggcttgcggcagcccatttaggcaggcaggttcctttttggatggcgctggcagcctcggtcgccggtctggtgatctgctgctttattaaggatccgtctgctcctcccgcaaaccgtgacaccattcgtgtcaatcagtacatcaaagatacattgcagctgccaaagctgaagcttttcaccatcctgtctatgacggcccatgccgtattatttatcacagtattttgttttacgccgctttacatgaatcagctcggaatgggtgacgcggagcttctttgggtgatgagcgcctttttcctcccacacgcagccgccacattaagctttgtgtttctgcgctttacaagccgtatcgcttactccgtgatgctcattagtttcgctgtcaccggggtctgtttgctatatgttcctttttcagctgcattgttcacggtttgcatcacacacgcctgtatcggactggcgctcggcttcgtttttcctctgttgctaagccatgtcgtcgaaatcagttctgcccgattaaaaatgtcagtgatggggttttatcaatcattttatgcgctaggcatcttcctcgggccccttcttgccggaaaaatcgcacagcttgtcgggcttgcgggagttttttatggagccgggtttctggcatttgccgccttttttgtgatgctcgcgcaaaaacgtaacatgatcaattaatagctttcataccgccggaagcgccacacagaaaacacggccagaagcatgatgcacagaatggagaaagtgagtgaccatccgaaaaaatctgcccgctctccatgaagaaggatatgctccgcctgcttgcaaatctcagccggaagccacttcgcaccatctggaaatagtgaaacagcaaaggaaacggctgctgtgagcccgatcccgcaagccgcagctgctccgacagaccggaatatcgtacttccggcaaggccggcggtcacaataaatatcacccaaagcgcgtaaaggccaaggcttgcggcaaagcggctgaatgatgcgtcctcaaacagcagccggacgtaataataagcaagcccgtatccagctgcaaacgacataatgccgatcacgctttggatgagccatttactcacgatataatgggctgccgtcacaggccgcgacataatcagcgctgttaccccttgatttctttcattggctacactgcccatcacgctaaagatgaccagagccatgccaagcgtgttgaattgagaaagcgtgcttaccatcacttcagacccggagggcatcgtaaaactgattttcatgccgtcaggaaggttccctccatgtgcgatgatttccggcatataataaatggtcagcggctgtgtcagcccgacgatcatcatcgcaatcggcagccaaatcagcttgccgcttttccatccttccagccactccttctgcaaaagcgccatcatcaccttcatgcgtgcaccacctttagatagacgtcttctagagactccgttttctgttcaaatcgggtgacggtcaatccctttcggatacagtcacttaataatgaccggccagcttgtatatcaggcagctcgaaaacagcttgggacggatttttatagacaatagctgagacgtaaggcttctcttcaagccagccttccagcttctctttcactgaaagggtaaaaacgttcgtttgctgctgttgtttcagctcctgtaactcgcctttccatgaaatttcaccatttttcataatcaccacttgatcacacacctgctctgcatcgtgcaaaacatgtgtagaaaacagaacggccatatgctttttcagctcccgcatcatgtccagcacctcgaaccgtcctgtcggatcaagcgcagacaccggttcatccaatatcaaaaacttcggtttatggagcagtgcctgtgccagaccgagtctttgtttcatgcctcctgaatagcccccgatctttttgtgcgccgcttcgtgcaaacccacaaattccagcatctcgccgatttcctcttggcattttctcttcgaaaggccggacagtctccccgcaaatgtcaaaaattcatttgcggtcatccaggaataaaaagctggatactgcgggaggtacccaatcaaacgccgatccggctttttttctcctaacagcttaatgtttccggaggttggcgaaagcagaccggccagcatttgcagagtcgtggttttgccggctccattaggtcctaatagtgcgacacactcattttcattcacgtgaaaactgacattctttacagcttcatgatgcctgtacgatttgcataatgattcaatagacagcatatcggcttacctttgctttctgccgacggtaaaaaacaaaatcggcccaataatattgatacatacaatgattgcagcccacatccactttggcccgtttgtccgctcttcttttatacagctgataagggcaaacaccgccaaagccagctgtaatacaatcagcggcaaaatcatttcccaagaaatattcattgcttgatcccccttttcttccgatccggcctaatgacaaaaaagtaataacaaatcagaggcatcggtgcttgaatcaatccgacaatcccccaaacccatgccatgcgattacgttttttcgcatcaataaataaaaagattccctgcgccaatacgatgagacaagccgcaaccgttatgataatttctgtttgtgtcatccgcgtttcacctcgcattcgccgagatgcctttttttctcagccgcaatcaaaatcggcagcaccgcaagcacacaaacctgaagcacaataaacacagcaggagcttgagtgaaagctaagattgcagcactcacaaccatcagcgcgcagaatacaaataaaatgatctcttgaagaagtttttttctgtattcagctttcatttgtgacagctggtgaagcagttctttttgattcggtatagagggattggctgtttgatcaatttttttccattctgactttaaatgatcagaaagcttttctttattcatcgtcccactcctttctgatttgctggagccctttatgaactctggactttacagtgccttctttgatttgaagcatcaccccgatttcagcgtaggtatagccgtagtaatgccttaataaaaccggtgtgcgcagtttagggtccagctttgaaaacagatcgagcgtttcgctccactctgcccctttcgccgacacgtcccacttgatcttgcggattgtttcctccgtaactgtctgattccgtttccattctctctttctctttttctgatgatcgagatagagccgcgatgcaatggagatcagccatgtggagaattttgaacggccctgaaagcttcttaaatggatgtaccctttcagaaaggtttcctgaacaagttcctcgctgagatcggggtgaagggaaagctttaacaagtatttatataagaaagaatagtgatagtggaaaagggctgtaaacgcctcgtcgtttccctctttcgcctgctggatcagccgctgttcttcatgtgtatccaatgaccgtgatccccccttttttgtttttctgccttatgagacgacaccggattcaaaagcgttcatcttttttacaattcttttcagccattgacagatcaggcttcccggccgtttggctgcatatccttatttgtaaacccccttatagtctgttaagctatgactttatgtcgatttcaaaaaaacatccaatatggaggacgatgcattgaaagtagaaaggcgaacgattgaatatattccgaatgaagaaagacatggtaaagcgaaagatttatttcccgtatggttcggggctaatatgcatatcaccacgttagtgaccggcacgattcccgttgcaatgggacttaatctgttttggagtgttgccgctattatttgcggaaccttaatcggtgccatatttatggcgtctcattccgcgcaaggccctcagctaggcatcccgcaaatgattcaaagccgtgcccaattcggcgtaatcggagcgattcttcccctcttcttagtcatgtttatctaccttggtttcttcgcaagcagcacgattctggcggccggaaccttaagcagctttgttcccatcccgggatcatggagcattataggcttaagcgccttatgttttttactcaccattttcggccatgatttgattcacaaaatgcaaaaaatcctttcttggacctcttttgctgtattttttgctgcaacgattctcatttttcaattgccgattccggcaggcagctggattcccggagcgattgatctgccaattttcttggtggcagtcagcgcagttgcgacgtggcagcttgcctacgcgccatatgttgccgattattcaagatatctgccagttaaaacaccggcttcaaaaacattttggtacagctatgcaggtacatctgtcagctccatctggatgatgctgctcggcgcattgctgacaacctcacttcctgactttacggcaaactcaggcagccagattgtccaattgttcggtcccttctcgtttattatgctgatcattgtgttatttgggcaaatggcgatcaatgtttttaacctgtatggggctttcatgtccacgacaacaacgctggagccatttctgaaattaaaagtcacgcccaaagtcagaatcatcatgatcctgggtgtcacgcttgtcggcacagtcttaagcctactgggacagagcaattttatggagctgtttttgaattttatctttttcatcagttatttcttaattccgtggacggcaatcaatttagtcgattactacttcgtccgccacggaaagtatcaagtcaaagccatgttcgacgtaaacgggccttatggaaaggtcaattggatcaccacaattgcgttcgtgctgtctatcttgctggaaattccgtttatcaatacaagcttttacatcggaccgcttgccaaaatgtttggcggcggagacatcgcatggattatcggcttggccgtgccttctgtgctttactatgcattaatgaaaccgcgtctgaaaaaacgggcggggtatcaagaaaagctgtcttctctctgaagacagcttttttatcattcaaatcgtttccacacgcggggcaggatgtcagatagctcatgagcgagcaacgtatgagcggagtgctcgtccgtccagagctcggcgcacgcaccatgcaaatagaccgcgtttaatatggcgtgctttggatcttcatggcagcagagcatccccaatatcatgcccgtcagcgtgtcaccggttccgcccttggcgagcgccccgtttccagttggattgagccagcagtctccatcaggaaacgcgatgacggtttggtttccttttaacacaatgacagtctgcagctgagccgcccattcctttgcatattccgctctttttttctgcaattcgttcacgggcacccctgtcattcgggaaaactcgcccgggtgcggcgtgaggatgacgggggcctcccgtttcggatatgtgcgcttcgccagcgctccggcatccaaaataacaggacaatcagccgtaagcacatgatcgactgcctgctgtacgctttccgtttgcggaaggcccggtccgatggcaatggcccggtacgtctcttcaagctgagcatccgccgcctttttccagccgtcacgccaataggtcgcctcgggcaaaacaggaacaattagcgggattacgctttctgatgtaccgatgacaagcttgccgagaccgctccgcatggccccaagccctgcaagcagcgctgctcccggcatgtcgtcacttccagccagcagcaaagccgtaccgtacgtgcctttatggctctccgcatctctttcaggaagcgtggcccttacatgctcttccgtccaaaatggaacattcatctctatccctcctctgctttcttttcctatttttcctgtcccttttctttttcaaacaaaaaagacagccttttagggctgtcttttattttacaggaacatcaaggtgatacaggcggcgatatcgttcgtttgccgccagcagctcctcatgggttccttccatttctgttttgccgttttcgagaaatacgattttatcggctgcttccactcccgcgagatggtgtgtaatccataaaatcgtttttcctttcagcacctcaaacaccgtttccatcaattcacgttcggtaataggatcgaggccgactgttggctcatcgaggatgatgatcggtgtatcctgcagcaaaatcctcgcaagtgcgatccgctggcgctctccaccggaaaaacggatgccggtttcttgtacagaggtatgatatccatcaggcaatgactcaatgtagtcatgcagcttgacctgctttgcggcgcggcgcacatcctcgtcgcttgcttctccgtttccgagcctgatgttgttcaaaatacttgtatcaaacaggtgcggtttttgatttaacacggccaccgcatccgcaatctgatcctttaacagcgctgtctccactccgtttaacgtcacagaaccggagtccggtttcaaggcgccttcgattaatgcaagcgatgttgatttcccagagccgcttcggccgagcagcgccattttttctccttggcgcagcgtaaaggaaaagttgtgcagcacttggctgctgttgtcataagaaaacgtcacatcacgaaaggccaaggtgacatcttgaagatcgagcatttgatcccctgattcagtttgtgacgcctccagctgaggagccaccttgttcatgcgtctgatagaatcctgatagcccggcacttcgcctaaggcatccgaaagcggcaaaaaggcttccgtcaacggaaataccactagcacaaaagcggcaatcatcgttttagcgagctcgccgtccgcttgctgtcccgctgtccaaaacagcatcatcaaaataaggccggcgacaaggcattgcgcaacaaagtcccgccatcttgtaaagcattgttttttccgttcaagctcaaaccaatcatgttcctctttttcataagcatcaataaaagcatgccggcgtccgctgaacatccagtcgctgacacccatcacagcatctgtcagacggctgtacagcgcattccgtccgcttttcagcttcgcattcttcgctctcgtcacgagcaaagacacaaccggaaacaatacaacaagaacaaacaaatacagcgcaagcaatatggcaaacggccaagagaagaagccgagcgctatcactgacacagcatacaggagcaaggctgagatcgcaggaaaaatcgtttttaagaatgcatcctgcaaatgctcaatatcctcagacaaaatgccgagcatatcccccgtgcgaaaacgggaacgcagcatcaaagcacccggctcaagcatattgtaaaggcggacgcgcatgtcggatacgattttcaaaatgatgtgatgcccgacaagccgttccacatatcgcgacacagaccgcgcaatcccaaaagtgcgcactgcgacaatcggcacataaatgagcagaatgttttccggccttgtcgccgctttagaaatcaaaaacccagaggtgaacatgagaaaagcagcagaaaaaatcgtcaccgcgcccaaaaagataaccagaacaaacaggcgggcattttgcttgatatacggcaaaatccattcttctttcttcatgctctttcccccagttgtgccttcacgagtttggtatacacaccgtttttctccagcagttcattgtgagtcccgatttccgcaatcctgcccccgtccagcacgataatttcgtccatatcgagcatccagtgaaggcggtgagtcgcgagaaagacgagcttatcctcaaataaatccagcatcgtttcttttatttcatattctgtttcgatatcaagatgggcggtcggctcatccagcagcaggatcggacggtttcccaaaaaggcgcgggccagcgcgacacgctgtgcctggccgccgctgagcgcccggccgccttccccgatccgcccctctaatccttgaggaaggctatccaccagctccgccagtccagctgccgcagcagcacgggctgtatcctctgccgaagcgcttggatggtagaagcgaatgttgttgccaagcgtatcatcaaaaatgtacggatgctgtggaatgtaaagaaggttcttctgccagctgccgtcctgcaaatgggaccggcttgtaccattaacctcaatcatcccgccatccggctctaaaaatccgccaagaatatcaattaatgttgattttccggcgccgcttgcaccgataataccgatttttttcttgcccttgaatgagagatgaatatcagacaccgaacggccgactgacacgcctgacagcttcagctcatcctgatcagaccaagcctcgagctgaagcggcgtctcttctttaaaaccaggctgcgacaaaatctcttgaatggtttttcctgcttcctggccgttcagcgttgcatgataatcattccccacttcccgcaccggcaaaaaatactcaggcgccagaataagcgccgttaaagcagggccaagcaaaatatcgccgtcaatgaggcgcaggcccagaaatactgcgactgtcgccaccgacagcatcgtgaaaaaatcgagggcgaatgatgacaaaaacgccacccggagtgtgctcatcgttgccttgcgataccgctcactcacatagaaaatatttttgctgtgtgacttgctcaaacctaggaaacgcaatgtctccagcccgcgaagagaatcaacaaaatgattggaaagtctctgataggatttccactgacgatccgcttttctctgcgcgacaaggccgaggagaatcataaagatgatcagaatcggcatagcagcgactaaaatgatggctgatgtccgatcctgaaaaaacacataaatgacaactgccgcaggcacaatcgccatgctgaccattttcggcagaaacagctccaggtagcggcggaactggctgatgcctcccatcgccagcgtcaccatttgccccgtcccctctttctttgcaaagcgggggcctaatcggaacagctgatcaagaaaacttttcctcaaatctgctcctgtccgggcggcgtattgatagacgattttctgtcgcgccaccgtcaccccgtgccgggcgataaaagcgatgaggaaaaagccgatcatcggaaaaagggaggtaatgcccttcccgttgaacagtccggttacggcctcactcagccactctgcctgcataataatggcggctgtctgaatcatcgttaaacaagtaatcaaggtgagaatccgcttcattcctttatatcgaaacaggtcttttcccattaataagtcataggctccttatggctgacgcgcttccggaagacataatagctccagatctggctgccgatgacgaacggcaatagcgttaatgctgcaattgacatgactttaagcgaataatctccggaagaagcgttagctactgttaaatcgtatgcgctatgaagcgagctgaccattacgcgagggaatagggaaataaagatcattcccacggtcagcgccagaccagcgcctgtcatcccaaatgtccagccgtcttttttcttacgaataaatacagccgcgagcataaagcagatgacaatcaaaacagcgagcggaatggtaatctcgccgcggcgtgtaaacatgtctgtctgatacgcagaaagggccgcgaaggcaagaaccgctacaaaaacaacacccattatcttttgcgccattttccgggcgcggttttgcaaatcaccaatcgtacgcagcgtgataaacattaatccatgctggaagcaaagaagcgttaccgtcacaccgccaagtatagaatatacattgatataatcagaaacatgtgcgtgaatgttcatgtcggcatcaatcggcatcccgcggaataatgtcgtgaacagcacaccaagcacaaacggaggaatcagactgccgaagaaaacgacccagtcccaaacctttacccattttaaatgatccaccttgccgcggaactcaaacgcgaccccgcggcccattaacgcaagcagcactatgacaaacggaatgtaataaccgctcagcatcgttgcataccagtttgggaatgccgcgaaaatggcgcctgcgccagtcaaaagccacacttcattcgcgtcccagaacggcccgatcgtgttgatcagcactctgcgttctaattcattatggccaagaaaacgggtcgccatgccgaccccgaaatcaaagccttccaaaaagaagaaacctacaaacaatacggcaacgagtataaaccaaagatcatgaagagatgccatggtatacctcctgactaaatggatctgttgatacaggaacatcatgatgatcactatgctccgcaccttttttaatctcacggataaacaagaagacaagcagtgcaccaagaatcaagtacatcacaccgaatgcgatgattgagaataacagggagcccgctgttacattaggcgacacggattgagcggttgtcattaaccccataaccgtccaaggctgacgtccgatttctgtcataatccagcccgcggagttcgcaagaaacgggaaggaaatcaacgcgatcatgatgcgcaaataccatttgctgttttcaagctttttgcggcggtttaaccaaaggccgcctaacgcagcaagaatcataacaacacctgctcctaccatgatgcggaagctccagaatgtcgttttcactggcggaatgtagtcgccttttccgtatattttttcgtactcagcctgaagggttttcatccctttgacacttccgctgaatttctgataagccaagtagctcaaggcataaggaactttgatttcatttgagcttttttcattttttgtatcgatcgtcgcaaaagcggtccaagcagcagggtcaccgctgtcttcccatagaccttcactggcagccattttcatcggctgtgattccatcaagtgctcagcctgcatgtgtccgctaaggccgacgccaagaccggcacaaagaccgacgatcattgcgagtttaaaagattgcttaaagaacggcacttcttttttcttcagcagtttaaaagcactcactccggcaataaagaaagctccagtggcaagcgcaccgaaaataacgtgcgggaattcaacccaaagctgagggtttgtaatcaacgcgccaaaatcattcatttccgcgcggccgtttttgatcgtaaaaccgaccggctcctgcataaaggagtttgctgttaaaatccagaaagatgacatgatcgttccgaatgatacgagccatatgcagagagcgtgaattttcttcggcaggcggtcccagccaaaaatccataatccgataaaaatagattccatgaaaaacgccaataatgcttcaatcgcaagcggagcgccaaatacatctccgacaaaacgggagtaatctgaccagttcagtccaaactggaattcttgcaaaatccccgttacaacaccgactgcgaaatttattaagaataagtgtccccaaaactttgccattttgagatacagttcatttttctttacaagataaagagtctccatcaacgcaaccataaacacaagcccgatagacatcggcacaaacaagaagtgaaacaacgttgttgatgcaaattgtatgcgggctaataccaattcactcatgctttctcctccatttccggttaaaactgttaatttgctcactacttcacaaatagaaccgagactttgatcagtaattcacaaaatagacgaaaaaaatattgttcaatatttcacaaatgtgtcaaaaagtcgtccaatatgagacaagattgccagactgaccaaatgacacaatctctgactggttcatattaagtactttacaacgattcatttcaaaaataaagcctaaaatacctaaaaagtcccgccctatgtgacggatttttgtctattttgttgcttatttatgtcggctgctaggataaatgaccctttattatcgtacatcaacacatcgttccttgcgaacaaaatgcttgccctgcaccagcactcgtttctcagcactccgtcataaacagattttaggcaggatgcctcttttcatttgaaccggcaagtggagaaaagttgaatagtaaatttttaatatattaataatttcaattttttagtatacttaacatagtgaacaatttcactgcatcaagaataggggaggtttttcaatgggagagcttcaaacacacatgcaattgcaaacggatacaattcacgaaggggttcgaaaagagaattggtttgcgaaagccatgaatataaaagtaggcatcataccgcttcctgtgtatgccttgctgtttatattaatcactgtttttgttatgcatcacgatgtaaaaagtgacattttgacatccattgccgtcatggcgtttttcgggtttacctttgcccaaatcggcaaatcgataccgattgttcgttctatcggcggcccggccatcctagctacttttattccgtccgctgtcgtgtactatcacctgctgcctaatgatatcgtcaaatccaccacagaatttacagaaaactcaaactttctatatttgtttatcgccggtattgtcgtcggaagcattctcggcatgaaaagagaaacactcgtaaaagcattcatgaaaatctttattccgcttattgtcggatctgtcacagccgctattgtcggactggctgtcgggacattgctcggactcggatttcagcataccctgctgtacattgtcattccgattatggctggaggagtcggagaaggcgctatcccgctgtccatcggatattctgacatcatgcccatttctcaaggggaagcgtttgcacttgttctgccatcgattatgctgggcagcttgtgcgcgattattctagcgggattgctgaaccgcatcggaaagaaaaaaccggaatggacaggcaacggcaaagtggaccgctccgaagaagagtcccctgcgctggaggaatctcaaagcggacaacaaatgttcaacctttctttatttgcgtcaggcggtatccttgctgtttctttatacttagtcggcatgctcgctcacgattttttcggttttccggcacccgttgccatgctgttactggctgttctaatcaagctgttcagattggtgcctgcctcaattgaaaatggcgcgtttggagtgtcccgctttttttcaacagctgtgacctacccgcttctctttgcgattggggtatccatgacgccgtgggacaagcttgtcgccgcttttaacctcagtaatattattacgattctgtctgtcgttgtgaccatgatggccgttggcttcttcactggaaaatggctgaacatgtatccgattgaaaccgccattatcaatgcgtgccattctggacaaggcggcacgggtgacgttgccattttaagcgccgctgaaaggcttgagttgatgccgttcgcccaggtatctacccgcatcgggggagcgatcacagtatccttaaccttattgctgctgcaccagttttattgatccccgcaagcaagttcttcgtcaaacgaaagagcttgcttttttgcatgtccatatttttgcaagttcccatcccatgctatagtaatagttggaaatactagatagaaaggaatctggcatgcctatgggaactcatctatttctctttatgcttctcgggctgggattttatttgatatcagccctagctgcaaaactcattccggccatagacttctggattgatattgttctatgggtcggcgctgcagtttacatcttctctcatctctcattcatggacggcattgtctcactcgcgacaatgttctactgctattggaccgcaatggatctcattgtttcagagcgtgtggaaaaaccttcgggagactggcaggaaatcgagctggccagaaacaaaacacgtctcctgtcagacattacgctgaccgccattgtgtttgcaggggctgttatttttttcatctatggacctgacccaagccctctcaaatatgtgatccttctcggcatgatctccggcggaggggcactggtgaagcgtatactgaatgttttcagcgtaaaggttttttattcagcagccttagaaaaattgcatatcagctcacactatgaaacccgtacatacccgctttccgatttgaaggacattcagcttgaatcaacagctgatctcttaaagctccatccgcttctgacgatgtattcatcacgtttagatttgacaacaagctttcagcaagtcattaaactgtctcttcccggcgaaacactgtttctgacggtgaaggaaccgcaaaaatggaaaacaattcttcaggaatacacagatgcaaaaaacaatgtggacaatgtgatttctgttttgccgttttatcatagaaaaaatgtgaagcggctgctcgggaagctttattttgccgccagcgtaaaaggggtatccgcttacgccttattggtgctcgcgttatacgcatcacacgcctctccatgggtcatggctgttgccgtaatcctatattgggtattcaacatgtatatgtcagaccgtgtgttgcgggcagcgatggacgccaagccttgtcatcatccgcatgtacaggcagcggccgatatgattttccgatcggccggcatttcccatgtccgcatatacgaaacggagagtgatgattacaacggaatggcagtaggcatgaatgtcgggaggtcaatggtcatcctgacaagcgccacactaacacttccacagcgtgtcatcgaaggcattctggcccatgaggcaattcatatcaaaaaacgtgacgttctgtcatcacagcttttgcgttttctatatcttggagctgtcgttgggattttcctcttgtttgagcagcatatcacccatcccgaggcccacaaaattgcgctttgggctttcattatggcaatcattatcctattccagctctatcaatccttttgttcacaatggatggaggtgcgtgctgacaaccttggcgcatccttgctggagggcggttacaaacaaatggctgaagccttgaaaatcttggcggttcagcaggatgaggacatacagaaacaaagtgcctacagctctgaagccggtgaagacgagcttcaaattgactctctcacccgtgataaaagctggtttttcagattgattgattttcagttcgctcctcatccccctatgtattggcgtgtcggcactttattgtcaaacaaaggacatggggtgctaaagcgctggctcagagaccgcctgaaagaatcgatcactttgaaatgaaaccggtcagcgtttcatccgtataacagatatggtgaaaaaagggagtgaccagaagtgatagtgatcttattgataatagctattattgtttttctttcagtcattcagccgcagccatcggataataaaatccgccagcaggcggacagcgggtatttcggttattcagatcatagctcgcaccatgatggattcggcagtgacggaggtttcagcgattccggctgtggcggcggagggggcggcgattaaacgccgcctttttttatttcattgattcgatgtacgcaccaaaagccgagcccgacatgcctggggacacgcgcacacgatggagggcatacattccctggtctctcgaagccgcgcccggttctgtcgtcacgcccatttgatagcctgttttttcagcggccttcagcgtctcctcattgtagcgccctaccggatagctgatgatggtggtttgctgatgaaacatgtggtcaaacagctttttcgaatccgccatctcactttgctgctgttgaggcgttaatccgttcagctcaaggtggtcaatcgtatggctttcaatcgatatgccgtgctgtgccatttccttcatttgttcctctgtcagatgatgcttatgtccgatcgatttgccgatcataaaaatcgttgccttcatcccgtactttttcagcaccggatacgcatcttgataattgtcggtgtacccgtcatcaaatgtgatcagcacgcacttctcactcggttttttatcctgcgtcagcatgagatatgcctctttcggcgttaatgtctgatagccgttatcatgaagccacttcatatgcgcctcgaattctttctttggcacacggaggctgtttcctgaagaaatgctgtggtacatcaaaatcggcagctttgccggtttctctgttttgatccatgcggatgtatcgtcttcttttttctgaacttgtactgcctttttttccggtttcttttgttccgcttttggcatcggctgctctgcattcgcctcttgatcagcgcaagccgcaagagccaaacagctgcccaaaagaaagatgcttaaaaacaatcgtttcatcgttctcctgctttctgtctatttcttcctcctttttcatcggtttgattctgagattttcaatagcaaaaaaccggacatgtctccatgtccggtttttttgatcctattgaattctcacttctgtctcactgtcaaagaaatggcctttattcatatcaaatgcaaccgtcagctcatcgcccgattgaatatcgaggcgggcgtcgatccgcgcaataaagtcttggttgtctatctgcgaataaatcataatttcagaaccgagcagctctgcaacattgattttcgccttaatcgaagagttcttatatgattccacgacaatcaattcatcatgtatatcctcaggacggatgccgaagatgacctctttgccgatgtagcctttttcacgcagcactttcatttttccttccgggacggttaatgccgcagaaccgattttgattaagccatccgtgagctttcctttgaaaaaattcatcgccggtgatccgataaacccgccgacaaagacgttttcagggaattcatatacatccttcggcgtcccgatctgctgaattttcccatctttcatgactacaatccgtgtcgccattgtcagcgcttctgtctggtcatgcgtcacataaatcgttgtagtctgcaatctctggtggagcttaatgatttccgcccgcatttgcaccctcagcttcgcgtccaggtttgacaaaggctcatccatcaggaacacctttgcatcccgcacgattgcccggcccagcgcaacccgctgtctctgtccgcctgacagcgctttcggtttacggtgcaaatattcctccagcccgagaattttagcagcttcctctactctttttttgatttcaggcttcggcattttccgaagcttgagcccgaacgcgatattatcgtagaccgtcatatgcggatagagcgcgtagttctgaaataccatcgcgatatccctgtcctttggcgctacatcattgacccgttttccttcaatataaaaatcgcctttcgaaatttcttcaagtcctgcgaccattcgcagcgtcgttgatttcccgcagccggacgggccgacgaatacgataaattccttatcggcaatatgaaggttaaagtcatcaaccgccggttccttctgatcataaaatttataaatgtgctccatccgcaattcagccatctaacatccccctttgttattgtaaacgctttcttatattgagtgtaacagcaattccctctcgctaaaatgggcagcgttcataaaatcatccagccatttttcgtgcatatttccaatttattctgaactttcattttgcaggcagataaaataggcaagaagcgcgcctttgtacgatttgatatctatccctgaccgctcaataaatttatcaatccgatattgcaggctgttgcgatgcagatgcagctttttcgctgttaatgtgacgtttgagttgttttcaataaacagcttaatggtcttccttagctcagcttcacttccaaataaaagctcagcttcttcagagagcagcgtttccagtttttctttttctgtttctaataatagaaaaggaaagatcatctcaaaggtcacactctgcacctgaggcagccgtttttcagcaaacaggaaatacgcctgttcacgagtgtaatgttttcgcagacactcatccggctcgtaaaatcttccggcgtaaaaacggacactgaagtagaaatcactttcaagaacttttgcgagcgattccagttcgcccttcttcgccgccgcttcactttcctgctcgacaatcacgcctctgtcctcatgaatccacacaatcacaaaagacaccggccaaaaatggcgaaccgcttctgtaaaggacgtcctttctattttgccgaataaatgaaagtgaacaaatctcgtccgtttctttatgtacgccggcaattcccctctggaaaaaaggaacgaaaaccacttgttttcctcaggtgatttcatagacagttgattgccctcatccgcaggcgtcaaaaatgattgcagcaccaatacttctttttcactgatctctgttttcggaatggagatatacctctgattgctctcatcaaaaaaacatagacagccttcccttatgcaaagctcctcagacacaatcgaaccgggataaatagccagcagcgatttcatagagtctcctctcttatgtaaggatctgtatattcagtataaggcgaaacacacatgttctccactaaaaaagagtatatccggtatagatagacgagaaactgaaagggaaacctcattcgtttacatattggcttcagcggaaatagaagaggatatgcaggaccaaaggagggccatcttatgagtttcgaaacgttaaacaaaagttttatcaatggaaaatggactgagggagaaagcggacgtacggaggacattttgaatccgtatgaccagtctgtgatcacaacagcatctttggcaacgggcaaacagctggaggatgcgtttggcattgcacagaaagcccaaaaagagtgggccaagagcacgacggaagaccgaaaagccgtcctgcaaaaagcgcgcggctatttacaggaaaaccgtgaagacatcattatgatgatcgcccgcgaaactggcggaacgatcattaaatcaacaatcgagctggaacaaacgattgcgattttagatgaagccatgacgtatactggtgaattaggcggcgtcaaagaggtgccatccgacattgaagggaaaaccaataagatttaccgccttccgctaggtgtcatttcatcgatttctccatttaatttcccaatgaatctatccatgagatccattgcgcccgcaattgcgctgggtaacagtgttgttcacaagcctgatatccaaactgctatttccggcgggaccatcattgcgaaagcgtttgaacacgccggtcttcctgccggtgtccttaacgtcatgctgacggatgtaagggaaatcggggacggcatgctcaccaatccaatcccgagattaatcagctttacagggtcaacagcagtcgggcgccacatcggtgaaatcgccgggcgtgccttcaaacgaatggcacttgagctcggcggcaacaatccatttgccgttctttcagatgcggatgtcgatcgtgctgtggatgccgcgattttcggaaaatttattcaccagggacaaatctgtatgattatcaacaggatcatcgttcatcaagatgtatacgatgagtttgtagaaaaattcaccgcccgtgtcaaacagcttccgtacggcgatcaaaccgatccgaaaaccgttgtcggcccgctgattaacgagcgccaaatcgagaaagcgctggagatcattgagcaggcaaagacagacggcattgagcttgcggttgaaggaaaacgcgtcggaaacgtgctgacgccgtacgtctttgtcggtgcggacaacaacagcaaaattgcccaaacggagctgtttgccccaatcgcaaccattattaaagctggcagcgaccaggaagcgattgacatggcaaatgatactgaatacggcctcagctctgcggttttcacttctgatttagaaaaaggcgaaaagttcgccctgcaaattgacagcggcatgacccatgtcaacgaccagtccgtcaatgattcgccgaatattgcctttggcggaaacaaagcaagcggtgtcggccgtttcggcaatccgtgggtcgtcgaggaatttaccgtgacgaaatggatttcgatacagaagcaataccgcaaatatccgttctaaatgaaaaaatccctctgtttcaagtacagagggatttttctttatttagatatatccacaaacccttcgccaaacacatcgcgtacgtcatgaacgatcacaaacgcttttttgtcgcagcttctaatgatttttttcagcatagacagctcctgtttgttaatgacgatatacaaaatctcttttgattggcccgtataatttcccttccctgataaaatcgtcacgccccgatccatcaaggtattcacctgctctgcaatctcactcttattttctgaaatgaccgtaatggcttttttcgtattcaaaccttcaataatgaagtccatcactttggtaccgatatacagcatcacgatcgtaaacatcattttttctgcaccaataataaaataagagctaaatactacgattaaatcaaaaaacaagagtgcatagctgatattccagtctaaatatttattagcaattctggccagaatcgcggaaccagccgtcgtcccgccgacccggataatcatgccgatcccgactccggcaaatacacctgcgaaaatcgtattaatgatcaattcatcagacggaatgctccacccatgtgtcagatgaagaaaaagcgaatttgccgcaaccgcaatgatcgtataaaccgttgtttttccatccagaaacttgtagccgattaaaagcaaaaacgcatttaagataaagttcgtgacaccaggagaccattgaaacagataatacaatatcagcgtaatcccagtgactccgccttccccaagatcattgggaatcgcaaataaattaaccgcaagcgcgaagaaaaaagcgccaatcacaagcataagtacatccagcattctctttttcatcacgaaaacactccttctcattgttctgttctactagcaaataaaaaaacccaggagaacgctctcgaaaaagagcagaaactcctgggcttttatcccaccgtgtcataacagccaatctgctatgtgttttctctcggtcacagtccaatttgcattgcggaaccctagaaaaccactgtttttatcatatccttttcactttccaatattagcattataagggacggttcgaattggttcaaggggtatttgcggagttttcatcagataagctggaagaaaaaacgatttatctattaaaaaagaacagatataaccgataagaaaaaaagcatatattttacaagtaaatgtaactataaatgataataattatgagaaattcataattttatattgactaagtgaaataatataggcattatagtacatatgtttcgtacattttattacataggaggaaatataatggcaggaaaactagtaccctgtaaagcttgcggtcaagaaattgcaaagggtgtaaaaaaatgtcctaactgcggtaaggatcaacgtaacttttttatgcgacataaaatcattacgtttattctcgcagttgttgtcatcattattatcggtaatatgattggcggcggaggcggttcagaagccacttccaaaacatcaagcggaagcaaagcagaaactgaaaaaacatacaatatcggtgatactgtaaaaactgaaaaaactgaagtgacagttacgaaggtagaggacagagatactgtcggtactcaatatgttgaaaagaaagcatctgatggtggtacaattgtagctgttcaatatacaattaaaaacgtatctaaaaagccaataagttctttttcaattccaactgttaaattagttgatgctgatggtacttcttatgattctgatattgatgcttctgtaaactatgcaactgagacaaaagttgataactctaaaattttgagtgatctaaatcctaatattaaagtaacaggtgtaaaagcatttgaagttgacaaggaagcttatgcaaaaggcacttggaaactaaaattcagtaatgatgttattgtgaaaatcaaataacagctaacaagggtgcctgttcaggcacccttgttctttaaaggccttctctattgagaaggcctccattcttattccgcactcttatacccattcacattagaagactgccatctccaggaatcagcacacatttcctcaaggccgcgtttcgcttcccagcccagttcccgcttggctttcgcaggatctgcaaagcatgtggcgatgtctcccgggcgacggtccgcaaaacggtacggaacctctttccctgacactttttcaaaggctttgaccatttcaagcacgctgtagcctgtgcctgttccaaggttgtatgcatcggctcctgtagagttcaatactttttccagcgccttgacgtggccttctgcgagatcaacgacgtgaatataatcgcgtacgcctgtcccgtcttttgtcggatagtcatttccgaatacgcttaattgctcaagcttcccgactgctacctgtgccacatacggcataaggttattagggattccgttcgggtcttcaccgatccgtccgcttggatgcgcgccgaacgggttaaagtaacgaagcagcgcaacgctccactcattgtcggctgtatgcaaatcacgcaatatttgttcaagcatgagcttcgtctgcccataagggtttgtcgcacctaatggaaagtcttccgtaatcggcgatgtttccggaacgccgtacactgtcgcagatgaactgaatacgattttcttgacgccgaatttctccatggcctcgcataaaataaacgttcctgtcagattgttatgataatatttgagcggaatcgccacagattcaccaactgcttttaacccagcaaaatgaatcacagcttcgatttcattttcagcaaaaaccgcatctaccgcttcccggtccaataagtccgcttcgtagaacgttaaatcttttcccgtaatccccttgacacggttcagcgcctcagccgaactgttggacagattatcaagaacaacaatctcgtagccgctgttcaataattcaacacatgtgtggctgccaatgtacccggcaccgccagtaacaagtattgccatgatgtaaccctcctaaaaaatgacctgttttcattatatagtgtttaaaaccggtccacatccatttttaagaagtttaatcgtttattaatagttttttcatatattatcagcattttcatacctttatgcagcgtgaacaagtatagcagctgaaaaatcaatctgccggttgacgtttttctttccctttttcgctatgcttaatgtagaaaggatttgatgacatggcgatgagcccatatatttttattgtattgattcttattattttatcgatgtaccgagagagagctgtcagacccgggaagttgctgatcattccgctgctgctcttatggggcgtatcagcatcgtttcagccggcgtattttcattccgtattacatgtggcgatcagcggcattttattattaatcgggctggcctgcgggtttggcattggaaagatggtaaacgtgcggattcacccggaaaccggaaaggtcacttcacgcggctcacttgggagtgttatcctcattctagtgatactttctttgcgcatggccgcgagaacatggctgcctgagagcaacgagatgtttattgccattattcattctatgttcttcattcccctcggcaccattacagcccgtaacattatgctttataaagcatacagacggctgaccgctggcaaggtatccattcaataactgaaagaaggaccagcatgaacagacaaactccggctcggcactactacaagaagcttgtgccgagccttattctcattttgaattgcatacaatttttatctcacccagccaaagctgatcccattttgttggcatttgtatttgcggtgtacttagcattcatttgggtcattccctatgtggcatccactgctgttagtttgtgcatattcatcggactctggctcctgaccgatttcttttgggctgtttccggccaagagcagggtgccgcctattttttgattgtatttttaatgatatatgccgcctttagactcccttcacggctatccttgatcttcacagcatgtttaattggaggcaacatattactcctatcctcacaagggggaagcttgaataccatcatcagcaacatctcgatcatgctcgggctgtacgtcctcttctcctccatgcgtttcagacgagaagcgagaagggaggctgaacggaatcatgctgaattggcaaaaatgcatgtgcagctggagcatgctcataaagaactccagaaagcgcatgcagagctgcaggaggcttctgttctttcattaaggtacgcggtccttgaggaacgtacaagaattgcccgcgacattcatgacagcatcggtcacgagctgacttctgttattgttcagcttcaatcccttccctatatccttaaaagcagcaaggaggattcagaaaaagtcattcaaaatgtactgagtgtcgccagggaatgtcttcaagaagtacggtctgtcgttcaccaaatgggccgtagtgaatcgatggtggggcttaccgctttgcgggggctcattcatcaagtggaggaacggagcggcttgcacgtttctttagatactgccggactatcagaagagtcttggcctccaaacgtgagcgaaacgatctaccgcatcttgcaggaagcgctgaccaatatcattcgtcacgctgacgcttctcatgcggcggccgtcatttctaacgacaagtcccatctctatatcacaatcaccgacgacggacaattcaccggcagccttacttatggatttggcctgacaggaatgaaagagcgcgcagaaaaagcaggcggttcccttactttcagtgccgtacagccgagcggcctgaaaattgagctgtcattgccgctcatgacaacgaataaggagcaaaaagatgaacaaagataacatacgcgtcgcgcttgccgatgatcagccgcttgtgcgtgaaggcttccgctacgtcatcaacgcacagacggatatgacggtttctggcgaggccggcgacggtcacgatattatagcactcgcaaaacaaacaaaacccgatgtcatcctcatggatgtccagatgccgcgttgctcaggcatcgaagcagcgaaagacattatgtccgcacttccagatacaaagatagtcattttaaccacctttgacacggaagaatacgtatttgaaggcatccgtgcgggagcagtaggctatctgctgaaggatacacttcctgaagagttgatagatgcgattcgcgctgcggccagaggcgaggcgattttccgtacagtcacagctgctaaaattatcagtgagacatttcaggcgaagcaacagccccatccagaagaactggcagagccgttcaccaaaagagagcttgaggttcttcagcaaatggcctacggactgagaaatgaggatattgctgaaaagcttttcgtcagtgaaagcactgtgaaaacccacgtgcaccgcatcctgcaaaaatgcaatgcccaagaccggacacaggcagtcgtttttgccattcgaaacggtattgtgcaatagaaatctctcatcccgccatgctaaaataagacaaaggagatgattggaaatgaaagaagaaatcattgaacggtttactacatatgtaaaagtcgacacacagtccgatgaatccgttgacacttgtccttccacacccggccaattgacattaggaaacatgctcgttgatgaattgaagtccatcggcatgcaggatgcagccattgatgaaaacggctatgtcatggcaactcttccctccaatactgaaaaagacgtgccgacaatcggctttctcgctcacgtcgacaccgctacagactttaccggcaaaaacgtgaatccgcaaatcatcgaaagctatgatggaaaagacatcgttctcaacaaacagctgcaggtcaccctgtcacctgatcaattccctgagctgtctggctataagggccatacactcatcaccacagacggcactacccttctcggcgcagacaataaggccggtatcgctgaaatcatgacagccatggattacctcatcaaacaccctgaaatcaagcacggcccgatcagagtcgcctttacgcctgatgaagaaatcggaagagggccgcacaaatttgatgtgaaacggttcaatgcttcctttgcctacacggttgacggcgggccgctcggcgagcttgaatacgaaagcttcaatgccgctgccgcaaaaattacgattaaaggcaacaacgtacatcccggcacggcaaaagggaaaatgatcaactctgcgaaaatcgcgatgaagctgaacagcctgctgccggcagacgaagcgcctgaatatacggaaggctatgaaggcttctaccacctgctgtcgattcaaggagacgtagaggaaacaaagctccactacattattagagactttgacaaagagaatttccaaaacagaaaagaaacaatgaagcgtgtcgttgaagtacttcaaaacgaatacggacaagacaggattctgctggatatgaacgaccaatactacaacatgagagagaaaattgaacctgtcatcgaaatcgtcaacattgccaagcaagcgatggaaaacctcggcatcgaaccgaagatttctcccatccgcggcggcaccgacggatcgcagctgtcctatatggggcttccgacgccaaacatctttacaggcggggaaaatttccacggcaaatttgaatacatctcagttgacaacatggtcaaagccgtaaatgttatcgttgagattgcaaagcagtttgaagcgcaagcctaatgccaaaaaaccagtccaaaaaaggactggcttttttgtgtgaaagtgaaacattttaaacgcgtcctccgtaaaacaagtattaacaaatgaggaggaaaaacaatgacaaaacatgcaatcgctgcaaagagtctcttgaaaaaatggatcatttccaggccgcttaacatgcaaaagaaatccagcccatttcaaaaaatcagaaaaatgttcaaacgcttcttcaaataaaacattcaaatcccctaaatacaatccgtattcacccgtaccgcccaaatgctccgtaatttgggttttttgtgttcaattccgcaaaatagggtataaaccaaacaagcaagaaaacagcacccaaaaacaggtaattcgaattacgtaaacttaggttaaaagttatataaaggaatttattttatcgtcgatagtaactatagaaccaatcatcaacgagagcaaacagcgtaattcaagactattttcaggtcatcaggtaatactgttttagagggacagtttcttgttatttattgatttagaattttttgaatactttttggcattttatccgtacaatagagagtaccaaaactttttttgggaggtatgtaatatgatcctatttattatcatcgcattatgcggctatcttcttttttctttcagcaaggacaatcgccgcaaaccgcaaaagacaagccctctgccagcagccgcacctcatcacaacaacctaatcgaccttgacgccatccgccaaaaacgccggatgcatctttcctaattctatatttcaaacgaaaaggctgctgaatcacgcagccttttaaaattgttttgatttagagcctgaaaccttttcgccacatatccgtaatttcatacaaggcaaacccaaaggagacttcagcaatgatcgagttatttatgaaacaaaaaatgttctcatttaaagatgcatttcacatttatgaccgggatgaacaagaaacattcaaggtggaggggcgttttttctcgttaggagactcattacaaatgacagactcatctgggaaaacgctcgtttccatagaacaaaaactaatgtctttattgccgcgctatgagatttcaattggcgggaaaacagtttgtgaggtaacgaagaaatgtaacgtttttcaaaccgaaatttgtgatttccgggcttaactgggaaatcgatggtgatttatggagggatgaattccagctgacggacggggaaaatgtccggatgtcagtgagcaaaaagtggctcagttggggtgattcctatcacttgcagattgcaaacgaggaagatgttctgatttgcactgccatcgctatcgtgcttgatatggttttatataacgatgaagatgaaggtattttctaaaaagcattgacaattgatccaaaagtaataatattaagataattgaaatctgaatatgaagttataccttatcaagagaggtggagggactggccctatgatacccggcaaccgctgtttcaaacagaatggtgctaaatccttaagaacattgtgttcttgcagatgaggcggagatttgatcgttcaagctcttccttacacaaaggaagagctttttacatgctcaatatttcagaaaagaggcgaataacatggctcaacaaacgaatgttgcaggacaaaaaacagaaaaacaacgcaaagcacctttccgcgccgatcatgtcggcagcttgcttcgttccgttccggtaaaggaatcccggcaaaaaaaagcggcaggtgagatgacagcggaacagcttcgtgatatcgaaaatcaagagatcacccgcatcgtggaaaaacaaaaagaaatcggtctcgatgtggtaacagacggggaattccggcgttcctggtggcattatgacttcctggaagggcttgacggtgtggaaccgttcattccggctgaggggattcagttccataacacaaaaacgaaagcgcgcagcatcaaagtgacgggaaaactcgattttacgagccacccagcgcttgctgattatcaatttttacatgagattgccggtaacgcgacgccaaaattgaccattcccagcccaaatatgctgttttttggcgaaaaggcggataaagggatttatgacgatcaagaggaatactttcatgatctggcccaagcgtacaaaaaagcaatcaaagccttctatgatgctggctgccgttatctccagctcgatgatacgtcatggtctctcttctttgaggaaaaaggcagagaggttgtccgggcgctcggcggcgatccagaaacattgccagccatatttgccaaaacaattaacgatgccgtcgcagaccggcctgacgatttaacgatcacaatgcacatttgccgcggcaacttccgctcaacctgggcggcatcaggagggtacgacgctgtagcggaaacgattttggacggcttaaaccttgacggccttttcttggaatacgatgatgaccgctccggaaactttgatccgctccgttttgtgaagcgcaaggatctgcaaattgtgctcggcttgatcacatcgaaatacggcgagcttgaaaatcctgaggatgtgaaacgccgtatcaatgaagccgcgcgttttgtcagcttggaccagctatgcctgagcccgcagtgcggtttcgcctctacagaagaaggcaaccttctgacagaggagcagcaatgggcaaagcttcgccatgtcatcgacattgccaacgatgtgtggagataatctatcattgacagaaatagaaaatgtgtgaataatagatactatcagaaaatttcataaaaaggttttccttatcaagagaggtggagggactggccctgcgatacccggcaaccgctgtttaacagaatggtgctaaatcctttagagcaatgattgctcttgaagataaggttgagattgtcacgcaagctcttccttatccaaaggaagagcttttttacatttgaatggaaagaaggaatggacaacatgtcacaacaaacaacacccgcagaacaaaaatcacttcaaagaaaaaaaccgccgtttcgcgcggatcaagtcggaagcctgttgagatctgagcccgttaaaaaagcgcggctgcaaaaagcggccggcgatattacggctgagcagcttcgccagatcgaaaacgatgaaattatccgcattgtggaaaaacagaaggaaaccggcctgaacgtcgtgacagacggtgaattccgcagagcatggtggcactttgatttcctggaaaacttagatggcgttgagccgtttactcctgagcaaggcattcaattccataacgtacagacaaaagcacgcggcattaaagtcacaggtgatatcgacttttcaactcacccaatgcttgaagattactcatttctccatagcattgccggtgacgcgacgccaaagatgacgattccaagcccgaatatgctgtttttccgcggaaaattggaaaaaggtgcatacaaaaacgactatcaccttttccagcatgatgtatccaaagcatataaaaaagcgattcaagcgttttatgacagaggctgccgctacctccagcttgatgatacagcgtgggccgttttcttatctgaaaaaggcttaaaacaaatcgaagcgttcggaacaacgcctgacgagcttcgccagctgtttgcgaaatcgattaacgacgcgattgcagaccgcccggatgacttgacggtaaccatgcatatttgccgcggcaacttccagtccacttggacagcggaaggcggctatgacgcagcagccgaaaccatttttgacggcttgaatcttgacggacttttcttagagtatgatgattcacgctcaggcggatttgagccgctccgttacgtaaaacggtctgatcttcagcttgttcttggcttagtgacatctaaattcggtgagcttgaaaatccggatgacgtgaaacgccgtatcgaagaagcgtcccgttatgtaagcttagaccagctttgcctcagccctcaatgcggatttgcttcaactgaggaaggcaacaagctgactgaagaacagcaatgggcgaagctccgccatgtggttgagatcgctaatgatgtttggaaataagaaaagaaaaaacacacttgattccctagcggagcaagtgtgttttttatgtcattgtgcggtgtagcccccatcaaggacgacagcctgcccagtgacgcccttcgccttctcgcttgccaaaaacacggcataatccgcaatttccttgacggaaagcagtcgcttttgcggcacaagcggaaaaatgacttgttcaagtacagagtcgtaagggacatttctagttttcgatagatcgctaagctgattgcgtacaagctgggtatcgacataacccggacagagcgcattgactgttatgccgtggggcgcgccttccagcgcccctacttttgtgagtccaatgacgccgtgcttggcgctattataagcggatttccctgcaaagccgactaatccattaacagacgcgatattaatgattctgccaaactgctgttttttcatgatcggaaaaacatgcttcattgcaataaagggggccgtcagcatgaccttgatcagctgttcaaaggtgtctgtcggaaactcttcaatcggagcgacgtgctgaataccggcattgttcaccagaatatccaagcggccgtattgtttttggatgacgttcaccgtatcagcaacttgcgcttcctttgtcacatcatacggaatggccgccgcgtcaaagccttcttctgcaagcttggaggctgctttttcacatgcttccggacggaggtctgaaacgatgacgctggcaccttcccgggcgaattctcttgcgatttcgaatccgattccgccggcagcccctgtcaccaaagcgacttgttttctcatgtcaaacaccttcccattaagaattgagtacagactggcttacagcgaaatcagcttctgttttttcataaacctcttcaattgtgacaccatcctgaagctccgtcagtgtcatgcggccgttcacaaaatcaaatacagccaaatccgtaatcagcctgtgtacgactttctggcctgtcagcggatgagagcatgtttttttcacctttgattcaccatgcttattgacgtgctccatgatgacaacgattcgtttcgccccgttgacgagatccatggcgccgcccatcccttttaccattttgccggggatcatccaattggccaaatcaccctgctccgaaacctccattccgccaagaatagccaaatcgatatgcccgcctcttatcatcgcgaatgactcagcgctgtcaaaataagaggcgcccgtcacttcagtgatcgtttcctttcccgcattgatcaaatccgcgtcttccgttccttccagaggataggggccaattccgagcaagccgttttccgactgaagcatgacgtgaacgccatcgggtatctcatttgcgacaagcgtcggcattccaatcccgagattcacattcatgccgtccttgatttcttgtacagcccgtttgaccattcgttttctcgcttccttcacttggcctcaccctttcccgatgcttgctgaactgttcgtttttcaatccgtttttcttggctcgcgccaagcacgacatgctgtacgtaaattcccggcgtatggatatgatctggatcgagctctcctgcttccacgatttcttccgcctcggcaatcgtgatcttgcctgccatggcggcaatgggattgaaatttctcgccgttttcctaaaaaccaaattgcccatggtgtccgctttccacgctttgacgatcgccacatcgccggtaatgcctcgctccagcacataagtccggccgccgaatgttttatgttcttttccctcggctatggaggtgccgacgcctgtcgccgtataaaatcccggtatgcctgcaccgcctgcacgaattctctcagcgagcgttccttggggaacaagctcgacctcaagctctccgcttaaaaactgccgctcaaaaattttattttcaccgacataggaagcgatcattttcttgatttgcttgttagccagaagcaaaccaagcccccagtcatcgactccgcagttattgctgacaacggttaaatcctttactccctgatctcttatagacaaaatgagctgttcagggatgccgcacagcccaaaccctcccgcgatcagcgtatccccatcatgaatcagtttcgcagcttccttgcttgatgacagcactttttccatattgatgcccctttcgttttcttctacactagaccagtcaggctgtaaatcgcgatcacagcaaatacggcagccgttttaatgagcgtgatcgcaaaaatatcgcgataggattgccggtgggtcaaacccgtcacggccagaagcgtaataacggcgccattatgcggcagtgtatccatcccgcctgatgccattgaaatgacccgatgcatcacctctggcggaatattgtaagcctgaatcgcctgtaagtattgttctgacatcgcgcttaacgcaatgcccattcctcctgaagccgagccggtgattcccgccagcgcagttgtcgtaacggcgccatttacaagcggatcggtaaaagtatgtgaaattccgctgctcagcttatgaaaccccggcagtgcggcgataatgccgccgaacccgtactcggcacccgtattcatagatgccagcaaggcgccgccaattccttcattcagcccttccttcaattgggcaaacacacttctccaatcaaataaaatcgttgtgatgatgccaatcactaaagcaatctccaccgaccaaatagcagctgctgaagaaatatcaagcctgccgaactcctttaatcctatggaagaaaaatcaaatccattcggataccactttggcaggtaaatggtaaaatatttattcactgcaccgacgagaataagcgggacaaaggcaagcgcgtgccgaatcgggcttttgtccggttcagccgcggactcaatcgattcaggagcaggagcattctgcgaatcaaaaccgccatagccttcgccagatgcctgcgcttttttccgccttgattccaaatagagcatcccagctgccagcacaatcactgcgcccatcaagcccagccaaggggcggcataaatgtctgttttgaaaaacgacgtcggaatgacattttggatttgcggcgttcccggaagtgcgtccatcgtaaacgtaaaagcccctaaagcaatcgttcccgggatgaggcgttttggtatgtttgcttcttggaacatgtttttcgcaaaaggatatacggcaaatacgacaacaaacaggctgacaccgctgtacgtcaagacagcacccatcagcacaatggcaagtatcgctctttttgccccgacaagccggacaattgttttcgcgattgatgccgcaagcccggccatttcaacgacctttccaaaaatggcaccgagcaaaaacactgggaaatacagcttaataaaacccgccatcttctccataaaaattgatgaaaaaaaaggaagcacatggcttggatctgtcaggagcaccgcgaataacgcgcaaatcggcgcaaacaatatgacagaaaatccccgatacgccgtaaacatcagcaaacctaacgccaatagaatgatgatcagttccacacacacatcccccgtttccgcgaactagaaagcgtttacaaaaacctgtccgcatcggctgtttccgtcccctttccatatgtacgagaagcgtgggccaactattccgattaaaaaaggaaagctccttttttcggagctttcctctgccattcatttcattcctattaggatatcaacatcaaccgtaatatcggctgttttcatctctttcaggaggctgactcgatctttcggcgccgaccaggcaagcggcgtcatcttgagaagccagtggatcgcctgctggtcaagcgttttaacatagcgcagcctgacaggacggctgtgtgcagcatttgctgcaaaacgctcaacagctgccgcattggaatacgtgcgccttggtgaatcagtatataaaaattgccttaattctattaaatagtcgcttcgcggcactacttttacgagcatgccatcattcttcagcagtctatgaaactctgcataattggacggcgaaaaaatagacagaacaacatcaaattggcgatcatgaaaaggagcacgcgccacatcggcaaccgcccacatctgatctttgaatgccttagaagcttttaagatcccatccttcgaaagatctatgccggttcctatcgctgctttccctgcataatcaaacccgcaaagcgcattcaaatgagaaccctcaccgcaaccgctgtccaggatggtgaatgcctcatgaccagatgtgggatgactgatgagttctgcaatcgcatcatggagcgggtcaaaaaaaccacattctccaatcagcctgctcctcgcttcaaaaagctcggcaccgtaactggttttgaccggcttcgtcagaaagttcacgtagccgtgccgagatagatcaaatgtatgtcctcgttctgtacaaatcaagcttttccctgatgccgcatccatagaagaatcgcagagcgggcatcgaaacatgctgaaatcaactgttcgcttcatgataaaaaacaccccattcattcatttttagataaatgaaaaaggcatagacaaataaacctaggcctatctcaaaaattggccaggtctggcagtttgtctacacctgtcattatctataacgaatgaattggataatcatgaaaaaactccctttctgctgtatgggtttccccatttccattatacaacaaatctccaggatctggaaccttatagtgaagaaaaatcagtactgacatgctggtatcccgccaacatcatatcagcatagcaatccagcatgtttttcctttattttctcattttagaatataaattttattattgtgaaaatagttaaaaaggttgattttcaaaaagtgaaaggataaaatactgctatcatcttagaaaaagacattcttgtatatgatcagtaatatggtctgattgtttctacctagtaaccgtaaaaaactagactacaagaaagtttgaataaatttgaacgagttgaaaaggacaagttcttttctgtttgctcttatttttcacactttctgcacttccagaatttgtgaagaataagagctttttttgtttccataataaccctcataggagttgctatcatgtactttttactaaaccttgtcggtctcattgtgattatggcagttgtattcctatgttctccgcagaaaaagaaaatcaagtggcgcccgatcatgacgttaattgttctggaattgctgattacttggtttatgctgggaacaaaagtcggaagctgggccatcggtaaaatcggtgatttcttcacttggctgattgcttgcgctagtgacggtatcgcgtttgcctttccgtcagtaatggcgaatgaaacagtagactttttctttagtgcgcttcttccaattatctttatcgtcacattctttgatattttaacgtatttcggcattttgccttggctgattgataaaatcggatgggtgatttcaaaggcttcccgcttgccgaaattagaaagctttttctctattcaaatgatgttcctgggaaataccgaagcacttgcggttatccgccagcagctaacggttttaagcaacaaccgcctgctcacattcggcttaatgagcatgagcagcatcagcggctccattatcggatcttatctttcaatggtgcctgcgacatacgtgtttacagccattcctttgaactgcttaaacgcgctgattatcgcaaacctgctgaatcctgttcacgtgccggaggatgaagatatcatctatacaccgcctaaagaagagaagaaagactttttctctacgatttctaacagtatgcttgtcggcatgaacatggttatcgttattttggcaatggtgatcggatatgtcgcattaacgtcagcagttaatggcattcttggcgttttcgtacatggcctgaccatccagacaatttttgcttatctgttcagtccgttcgcattcctgcttggactgccagtgcacgatgcgatgtatgttgctcagctgatgggcatgaaattagcaacgaacgagtttgttgcgatgcttgacttgaaaaacaatctcaaatcccttccgcctcacaccgttgcggtggcgacgacattcctgacgtcctttgcaaacttcagtactgtcggcatgatttacggcacgtacaattcgatccttgacggagaaaagtcaacggtcatcgggagaaacgtgtggaaactgctcgtcagcggaattgcggtatctttattaagtgctgcgattgtcggcctgtttgtgtggtagaaacattgagccatatcccttttcggatatggctcttttcattattgataaatagaggctggcacctgcacatcccggattcccgctgcataaggccccaagtcatactggccgaagacgatggcgatcccgtttgccgtaaagtaaaacattgtgtctctgtttagggttatatcctctttctttacatcagggaaaaacagctcatcgtgttttttgatatagctatataggtaatctctcgttttgctgacttttgttttggtgttcagaatctgatccagcgtcacccgcttttgtgctttcaagtcatagttgaaggactggacagacgttaaaccgtgggcgccccctgaatagatataattgagtgtttgaatgctgagcttgcctgccgcattgtatttgacgctaaaggatgtttgatattccgttttaaagccctgctgttcgcctgcttttttgtttttcaggtattcctgatacgattgttcaatgtaggctttcagctcttgattgattttcttttcaaacgcggcattcccgatgtgatgcacttgtggatacgttaactccttgatctttttgtacgtatgagtgctgacagtcggtgttttcgtttgaactgcgtttagagatggggccgcatatgcaactacggaaaaaagcaagactgcaatccccgcggctttcatcattttattccatttcatacaatctcctcctttgatgtcgttgtttatcattcccttatttaagcaatacacacttttatagactgattaaatcgaaagaagtttctaggtctaacagcatgatttttccaataaaaaaagagacacaggatgtctctttttttactgtttgcgcccaaaaatcgcttcatgaacggcctgtgccaaatctgtatttccgaacatctctaataccgcaatgacagtctggtccggaatgtgctctgcttcgtgttttggcacgaccagatcgtccatggtttttttcaagctttcattcagcttttgctgcggatacgctttggtgtacatctccaccggatcaagatcatggttcacgcaccattgggcaaacaccaaaatcatcatattttcatcgcgttcgtaagcttcagcgagctgtttttcgttcatttgtcatgctccttatgaaaagtatcttccttaaagatacaggagccgatcaaattcgtctatcccaatggcgatgagcagaaaccgcatcgataaatgccttgctgaaagcggtgtagtcaggttcatctttagccgttacgatgcctggcccctctgttgtcccgacagaggattgaagaaggtcaattccttcatttgccgcaccgatcgccttgtagtgattgtaagcttctctgataaactccatcgcttgtttgttgtcttttaactccggccctcctgcggcatagacggcatcatacagaacagaatcaaccgtcaggaacgtgccgctggcctcaagctgctgtccgctgccgcttgtcatataccccagattttgactgatgatatctactgtgattccttcttgctttaaggcttccagcactgtttgcagctctttttcatgaaatccgtttccggtgagtacagcgacttttcttgttgacgcggttttcactgtacgggcttggcttaacgcaggcgaagtaagaatttctttagatgctttacgcttcgcgggcgccgccacgcctactcctttggcgatttcttctgctaaatctgcatcgacattgctgaagacatcaacaacctgccgctgtacgtctttgcttttgaccttcccgacctcgaagcagaaagcagaaatgatgtgctgtttctccacaggagacatgctgttccagaaaagcttcgcctgtgagtaataatcgttgaagctgtcgcttcgctggcggatttttttgccctcgactttttcctgatagtggacgtagccgccttcttcagctgtcgcaggcgacggatcattgttttgcagtgagtttttatgataagcgacaggccccttattgatcgtcatccgatgataaccgtcatattgattgttatggaatggacataccggccggttaatcggaagctcatggaagttcggaccgccaagacgaatcagctgtgtatccgtataagagaaaagtcgcccctgcaatagagggtcatttgtaaaatcgatgcccggcacgacatttcccgggtggaatgcgacttgttctgtttccgcaaacacattatccgggttgcggttcagcgtcattttcccaatgatcttcaccggcacaagctcttccggccacagcttagtcggatcaagaatatcaaaatcaaacttgaattcatcttcctcatcaatcatctgcacgccgagctcgtattcaaccttgccgccgttttcaattgtttcccacaggtcacggcgatggaaatccggatctttcccggcaattttctgcgcttcatcccatacgagagaatgcacgccgagcaccggcttccagtgaaatttcacgaaacgtgcctttccttgttcattgacaaaacggaacgtgtgaacgccgaagccttccatcattctgtagctgcgcgggatgcctctgtctgacatcgtccacatcaccatgtgagccgactcagggttattggcgacaaaatcccaaaacgtatcgtgagcagtcgctgcctgaggcatttcattgtgaggttcaggcttaaacgcatgaaccaaatccggaaatttgattgcgtcttgaatgaaaaacaccggaatgttatttcccacaaggtcatagtttccttcttcagtataaaattttgtcgcaaagcctctggcatcccgcaccgtgtctgcggagcctttagaacccgcaaccgtagagaaacggacaaataccggtgtcttcaccgaagggtcctgaagaaatttggcccgtgtatattccgtcattggttcgtaaacctgaaaaaagccatgcacgccatacccgcgtgcatgcacaacgcgctccggaatcctctcatggtcaaagtgcgtcattttctcccgaaagtgaaaatcctccatcagcgtcgggccgcgaaccccggcttttaacgaatgctcatcctctgatactcgcaagccttgatttgtcgtcattttcttcccgctgttatcggtcctgtactgctcaagctgctcgtcctttgagtgttcatttacacgtttgttttggtcatcactcatgtctgctcccccttttaaaacgaaacattctacagcacatttacccgtggcgttcttcatataaactgctaatccgctcattaggatttttggtctacatataaatatgcggtcatacacatttgaaataagccttcttcacagaaagaaaggatggaagcgcttaccaaaaaagctgttgaataggggaggtcatatcatgcttgccatactcggttttgtgatgatgattgtctttatgtaccttattatgtctaaccggctttccgctcttattgctttgattgtcgttcctattgtgtttgccctgatcagcggatttggcaaagatctcggcgagatgatgattcagggcgttacagacctcgcccctaccggtatcatgctgttattcgccatcctgtatttcggcattatgattgactcaggcctgtttgatcctctcattgccaaaatcttatcgtttgtcaaaggagatccgttaaaaatcgccgtaggcacagcggttctgaccatgaccatttcgctggacggagatgggacaacaacctatatgattaccattgcagcgatgctgcctctctacaaacggctcggcatgaaccgtttggtgttagcgggaatagcgatgctcggttcgggggttatgaatattatcccgtggggcgggccgactgcgagggttttggcttccttaaaattggacacgtcagaggttttcacgccgctgattcccgctatgatcgccggcattctctgggtgatcgccgttgcttatatcctcggaaagaaagagcggaagcggctcggcgtcatttcgattgatcacgcaccgtcttccgatccggaggccgcaccgctcaagcgtcccgctcttcaatggtttaacctgctgctgactgtcgctctgatggccgcactgatcaccagcctgctgccgctccctgttctttttatgactgcgttcgccgttgccttgatggttaactatccaaatgtcaaagagcagcagaaacgaatctcggcgcatgcgggtaatgcgttaaacgttgtctcaatggtgtttgctgcgggcatattcacaggcattctctccggcacaaaaatggtcgatgccatggcgcattctctcgtttcactcatccctgatgccatgggcccgcacctgccgttgatcactgcgatcgtcagcatgcccttcacctttttcatgtcgaatgacgccttttacttcggtgtccttcccatcatcgccgaagccgcttccgcttacggaatagacgccgctgaaatcggaagggcctccttgctggggcagcctgtgcatctgctcagcccgcttgtgccttccacctatctattggtaggaatggcaggcgtcagctttggcgaccatcaaaaattcactattaaatgggccgtaggaacaacgattgtgatgacgattgccgcacttttgattgggattatttctttctaaatgtatgagcttgatcgtagcattgagtgagtacgtgatttacagaggggagaagatcaaataggatattatgagtgaatagaagattcatgccaacaacttctcattacaatcataagagcctgctatattgcagcaggctctttcacatttggcattatttttttgtatagcgcacccagtcataatgagcgtatagcggatttacaccattgtaggaaccaagccattcatcgacacccgtgccattccacaagttcatcatgatctttccaggtgttgtcggaatttggtttgttgcagtatgttttaattgcccgtcgacataccatttaatagagtttggctgccaatcgaatgcataagtatgataggcattggctgcatcaaacccgagatcaacaatcttctcatggtttcctgcaccatttgtataatagttaaattgaaccttcgttgtgtcttttcctaaaaattcgatatcaatctcatcccaaggagttccatctgttggacctgtgtaagtgaagaacgatgaaacgatccctgtgtttttagctggtttcattctgacttcataaagtccatagccatatgtttgaacagaacggttttccccgcagtcaaacttgttataagctgggcttgttagcgctaaacgcatttcacccaatgacgtcattgatacgttattagcccgccacgtgcagttgaacatatttccattcgaataaccatctgctttttgccaaaaaccggagttatagccgttaaaagggtcaaaaaacgatccacctgtttgagctgaggcagtagaagtgactgcaaacaaactcataaacaatccagtgacaagaagcagcaacactcgtttcagataaggcatattggcattcccctttcattgaaagcgttttctatgttgatcttacatgattcttttaaaagggaacatcggtcaaaataatgataatatcgaatcttactgacttgaatcctgtaactatcatcatcttccctctgaaaaaaataaaaacctaaattaccatcagcacagacagagatgatccgcactcattgtaatttaggttttgcctgctttatcagtaacaatcctaccattttcatatgtgaatgtaagaaaaaatgaatacaaggaaacaaaaatgtcagcgctctcattatgcttgtttaactaccctttctatgtgaatggttaaatacagcagctcgtcacttgtgagcttgtgctcatactcccgctcaatgtaggtttggattttcttcgtgcattcatacgcgcgatgatacttttctttcactgtatccagcaaaaaatcgtcctggctttccatgtgagtgccgttaaaaagacgctgcgcgaaaaactttaagtgggtgacgaaccgataatagtgaagcgattcttcgttgaattcaatcttaaaatggtattttacaatactcaaaatctcttgcatgacttttgtaatgttgataatattgggcatctcttcattcagctcggcatttacaatatgcagagcaataaagcccgcttcatcctctggaagagacacacctgtcttgtttttcaccatgaccaacgcttctttgccgatcgtaaattcgtctttatacagccgttttgtttcccacagcaaggcgtttttgatatcaagccctttctggttgcgctggatggcaaagttaatatggtcggtcagcgacacatagatgctgtcgttgagctttttgccgagctgtaattttgcgtagctgataatctcttcggatacttccatacactcgatcggtatatcatacaaaagggttttgaacttttctgatacatccttgttatcgagcgtgaacactttctcaatgcgggcttcatcgacatcatcgccggactttttctgaaacgcgagccccctgcccatgacgaccaattctttcccttgttcattgaccacgctgatcacattattgttgatcaccttcgcaattttcatgacatgtccctccaatcaactaagaacagactatatcttgattgtacattctttttgtactaggtcaatatcatcagggaaagacggaagctggtcagtacaattcactccgtacctgctgcccgggctgtttttgaagcagcgcctccagatggcgttcaaatgatgccttgtcagctttctgctttttgacaatgctgttcatgattttgacgctttcggcgctgtattgtgtatattgttttttcagctgatccagctgctgtcttgtcttcttcgcgtttttcggtgtgacttggccgatgagtttgatcatactgtctgcggtctcaaaaaaaacggctctattttctgtcagctgctgaatttcgatccggctcatgtcttgattacgcgttttttgtagcaaggcgaccgcctcgctgttttgttttttgagcgatttgttctcaagcttaatcgattcgagattctccttcgcaatgtctgcttcttcttcagtcatgttgcttcgcacgaagtattctggattaccgattccataatcaaatgcttcgctcacttgtatcatggaactgaacacaatggccagctgcctgtcgcttgcgagggcttggaaatcctgctttttcttactgctcatcggtttggctgcggtttgttttactgtcttttgatcacagtctgcgaacatctgagcctcaccttcactttcgcatgcgctcatcacaagaactgtgaccagcaggcttatacacaagcctattcgcctcatgctctgtctcctctctgctgaatcccttctggaaaataccataaaatatagttaaatggtaccagattcacctaaccccagcaataaatcaaaagtatgatttgaagcgcaaaaacataaatattttgtaaaaattgacgtgcattccattcttttcaggcccatttttcgtacaatagaagtatcgttaccggagagggggctctgatgatgaaacgttttacgaaacaagaaaacagctgggtattatatgactgggcaaattctgcttactcaattgtcgtgaccaccgcggtatttccgttattttataaatcagcagctgcggaaagcggtgtcagcgccgctcaatcgactgcctatctgggctataccattgcgatttcaacgtttattcttgcgatgctcggccctattttaggcacaatcgccgactatgaagggtgcaagaaaaagttcttcggtttctttgtgtcagtcggtgtcgccagcaccgcgatgctcgcctttatccctagtgaacattggctgctattgttgctgttttatacgatatcggctatcggtttttccggcgccaatgtgttttatgatgcctttctcgttgacgtcacgcctgagaagcggatgaatctcgtctcagcacggggttttggcttaggatacattggaagcacgattccatttatcatcagtattgctgtcatcctgctcgcacaagcagagacgattccagtgtctgtatcggccgcaagccagctgtccttcttcataacggctgcctggtgggggctgttcaccatcccaatgattaaacatgtccatcaacgctattacatcaaaaaagaacctcatattgtcatcaacagctttaagcggctcggccaaacgatgaaacggatcaggcaataccgggcacttttcctcttcttgctcgcttatttcttttatatcgacggagtcggcacgattattacgatgtcgacatcctatggatcagatttagggatcggctcctcaagccttctgatcatcctatttgtcacccaggtagtcgccgcgccgttttcgattgtatacggaaaactggcagaacgcttcacggggaagaccatgctgtacgtcgggatcgtcatttatatgatcgtctgcgtgtatgcctattttatggagacaacgcttgatttctggatactggctatgcttgtcgccacctcgcaaggcggtattcaagccctaagccgttcctatttcgccaagcttgtgccaaagcgccacgccaatgaattcttcggtttttacaacatttttggaaaattcgcctcaattatggggccgctgctcattgccgtgaccgcccagctgaccgggaaatcctcaactgcggtgttcagtctgatcattttgtttgtaattggtattgtgattctggcctttgttccggaggagaccagcgccgatgtcagccagcagcaaaatgacctgcccctttaactgggagcaggtcattcatcatttattcgctttattcaccttcagctttttccctttgacggttgtgttcttcatcactttgagaacatgagggcctttaccatttaagatctcaacgtatgaggcgttatccatgatcgtgatgatgccgatgtcgtcagctgacacaccgtcaattttggcaatcgttcctacaaaatcaacggctctgattttctttttctttccgccgttaaaatacagcttcataatgtctttattcagctcttcgcttttgtcctttttgctttccggacggtcattcagtttagctagaaattctggtttcttccttgccacttcctcttgagaaggtgcttctattttttgaatttcaaatccgatatattcttcaatgtcggctaaaaaccgtttttcgaaggccgtgacaaacgaaatggcctttcctttgttccctgcgcgtcccgttcggcccgtgcggtggacatagctttccttttcaaccggcagatcatagttgataacaagggagatattttcaatatcaatcccgcgcgcggcgacatccgtcgccactaagtaacggtactcgccacgtttaaattcattcatgacgtcgaatcggtcttcctgaatcattccgccgtgaattttatcgcatggatatcctaagtcatccaattcatcggtcagctgattgacgtgctccttcgttcggcagaaaatgatgcagctgtcgggattctccgtcatcagcacatctttcagcaatgaaaatttatgctcttctcttacttgaatcaccgcatgttcaatatttcttgtggtaagcccggccgctttgatttcgatatgctcggggttttgcatatattgacggctcagcttctcgatatcctgcggaagcgtcgccgaaaacagcatcgtcgtacgctcagtcggcagatgcttgataatcgcctccacctgctcaatgaagcccatattcagcatctcatccgcttcatcaatgaccaaataagagagacgatccaacggcagcgtgcctttttcgatatgatccagaacacgtcccggcgtgccgacaacaatgtggcttttttgcttaagctcagctttttgtttatcaaaggaggattttccaaatacggctgtcgctttgatccgtttaaatcgtccgatgttcgtgatatcttcctttacttgcaccgcaagctcacgggtcggtgttaaaataagcgcctgcggcttgttttcatcccaattcgccagctcacagagaggaatcccgaacgaagccgttttcccgcttcctgtctgtgatttgacgacaagatcctttcgttcaagggcagcggggatcacactctgctgcaccttggtcggttctgtatatcccagtccttccaatgctcgtaaaatgtcatgactgatttgatagtttttaaaatgactcatgtataaactcctgtctcttgcagatgttctcattatactctaattgaccaaggcatatgtgttttgtcgaaaaatgatgtattaaaagccagcgattccctggcgttttagctcctgaacagccaatcgcgccagtgcgtcggcccccgcgcgattcgggtgcagcgtatctccatccatataaagcccgagtgttctttccggaccgatcgatgtaaagtatgccgagctgaggacatttaagtcaatgagatatgttttttcctcttcggccaaagctaaaatagaggccctgtaccatctgtttacagacgaatggatgccttcagaagtaaaatcggttgcccggccctgaggcgttgataggatgacgtccgctcctttcgcttttacctgacgaatcatatcacgcatcatctctttaaactccgcttcagattcattatgcttcggatttgtgtcattaatgccaagctgcaatataaaataatctcccggtttaatatacttcaggatcgcctcaagctgtccatcatttctgaaccctctcgcgatctgcccgccggacgccatgtttctcacttgaaaggtgtgtttatcgatatagtgaggcagcatctgcccccagcccgcctgcttgctgctgttgagcggataataattgcacaccgtcgagtcgccgccgacataaatggttcggttcgtcaccggctgatcagacaatttctttattttcaaggcgctaagcgtaaaagcggtgccggctttcccctctgtcaccagtagattcagctgcccgtcggtgacaggaatttggaacgtatcctccgcgccatcccctgtcatattgatgacctgaaacacgccctccgccgccacactggcccttgccgtattgccaagcgtcgccttcacctcataaaggccgttcgggagatccacttgaaacgtgttattacttttcgtcccatacgctaaaaactgaaccgcatcactcttcactccagtcccagatgctgccacatccttcatattctctggtgtttgaaagccgtagccctttgaccggtcataccgattagacgccctgacaccaatataaccaggctcaaccgaaccgtttccaaagtcaaactgatacaccttctgctccgctgccttcacactctcattcccgtcaaaacccaacatcaacatcatcacaaaaaccgttgccatccattttttcatcaagactccccctctatgaaaacgcatacattaatgcatactcggtgattgtttctttatgatgactgaatgaagaaaaaaatggcgttgaggaataaaaatgaggggagagtctcaagaaggggaaaatcagtgtgacttcttgtcacacttgatcacatcccaacctccgcaatagaaactcatctgatcttcttgatcatacacataataacggagtctttcccattgatcgtcagtcggttcaatctccaactcaaccgcatcaatggattcaaggtcatccagccttgatgcactaatgtcttcaaaccgcaaatgaatgtcacaggtttgagctgatcgttttcattcaaacacaggaatatgaatataacgatcatcttctttcatatagaaagaaaactcgtttaatgtaaatggacctgtatcctcatcagaaagatgctttttcaatttctcgtattgtgtgatattcaaatgaattcctcctatttttagttacctccaaccatatagatctccgcagcatcgtattcaaaccatatgatccgttcgcctgagtccgttaggcattggagcttcccttctgaaaaatagcttttatccggttggggatcagtgatcagaaaaacatcatcattgatggaagctaacagaaagagaaaatctgcaatatcccggtctgcttcctgtaatatggattggaaatggaattcccttttgtccagcttcgtcaccttgtaagcatgaccttcaaaatactcggacaggtcttctataaatgaaccagtcgttattacctgtatcatgattcgatcgtaggcaagccctgcccaaaaacgataaaacgactctgcatctttaagttcgcatgacataacggtttggtcaggcttaagctcgatcatgtccaaattgccaatactgcttatagaggttatttccataaaatcttccccttatcagttggatagcgcaacgcaaatctcttgtctgacttgttcatacaagagaatatgatgatacagatccttatcgttttcgatcatatccggaagtatgtcaggatacagctcaaaaaagcttttctccaacgaacgccgctgttgccggggcatccttttattcgccagcacataatccaaactgccatcaacaagcataaaaaactcatagatttccgcttcaaagccgtacaattcactaggatacggcgtttcttcaagctctcgctgtctttttttcagtttttcaaacacgccgactctctcctccgacacatgttaaataacaaactaatctatcttgaaacaggataggcggatatttatctatcgcctccaacaggtcttcaccaaacacagtgattgtcaatttccacgggtctcccaaaagtccccaagagaagtcctgatgaaaaaagaaataatagtctccatttggaaatacgggaacaggccattcgccaaattcatcctgaggcattgcctgatgagggctaaacatatatccgtcatgctgccaatctagtgcgtacattacttcgttctttccagtacctaattgaaatgcttttaaaatagaagcctctaaatcactcagcactccactcacatcattatgaccagctttactgctcatcgcgcttgagatatcaaacactcgatatggctcaggcggaatgatgtgatgccatctgcttccgggtttccattttatgagcttgttcacttctgaccagatgcggtcttgttttgtctgacttaaagcgcgccaattcatcatgatctcatccctacacctattggatatcctgtttgtaaacaccagaagaggccactgcataaacagcgttacttgtcagtttcagctgttgaacgtctagggcttcaccgttcgagtcacagcatgttatctcttccatctcttgactcacatcggcagaaatcaaataaagagacgactcaagctcttcactgtaacaattgaacgtcccaaccaaaaaaccttcttcagatatcgcaagctgataaaatgcttctgagttcggctctttatccgacagaatccatacccgtctcacgaccgtgtcgtcaaacgcggcaatgactgcatctccgtaatacagcatataaatcaagccgtttttttctgcaagtccataacaatcatctacagccggcgcatccatttcttcgagctttctatcaaagtgtatttccttctgctgaccatccaaagtaaaacaccaaacactatgcccatcaggattttcatcatcataaatgccttcatcatttaaaccgacccaaaggttttgtttctcatccaaaagacagcaggaaacccctgaaggcaagtgaaaagcacttttcactcttccctcttctgaaaaaacctttaccttcggctcatacgattcgtaataaacgaagacatagccatctgcacattgttgaaagagcagaatatcactgtatgaaatctgctctttggctttaaaaacccgaatatcaccggaaggatcatagattgaaatggtcacatcatctttcacaccttttccaatgtagacacgccccagtggatcagcatggaaaaaacaatcttgggtgtccgtgttgatgactttattcatttttaattttttcatttgttatgctcctaggttagaaatgaagtgataattaagcatttattagctattagtaacggacagcctagtttcattaatcgttttgatataaagctactttccaattcagtcttaaagcatttagtatttaattggtatgcataaaacgattgatcatcaaagcgaactgtttcagcttcaatagcaatcagcattctgttcatgtcaataagaaagttagcatttgattgatactccggaattatataatttgatagattctcgattccttctggatgataactcatctcaaatacttgccaactgtattcttccggatctattttttccaatctcatgtcgccaacatctgcactataataagcggatgccacattttgaaatgatattttatgcgtatattcaccttcatcttcaaaaaccttaatatcaagtgagagttcttttttaaacacattaaaatctaaatgaagaacactgcacccctcatctatataatcaacccattcattaatcgtttgatacattgtcatcccctgcttctttttaatcaatagcgcctttccaccaagcagaaagcaaattactccgtatattgtttgatccaatcatttaaatcatctgttgaatgcaaataagtttcaggagaatctttcaaatcaattccgcttaaaaggattaacatatcccagactctaccgttttttactttagggtcatccgcataaatataagggcccgcccaatctgacacttcttctcttgttgtttgtccatttaagacacttttgattttatttatgcattctagtagttttggctcgatcaaattgatcaccacgcactcaatattcgtttggtataccgacaattctatttattttattaaagcctgctgagcaatcagatgatcaacagacaattcggtaaaagatcctctaccgaatgaattctattattcgctttgaagatccaaacaaagtatttaataaatgttattctcattaacaataattgcatttttatattcttctgctgatgttttcataaaagaaatttttttatgattaaataaagtattagtttttaaatttgcagagtatatataatcattactatcgctttttaataccaactaagttttcaatatattatatgctctattgttttatttttttcaagccaatcatagtcattaagagttgatatttcatcaaaatagtacattcacttttccttttactaattgagaaagctttttttcgcaccaagaatttgaaataactgtattattgatttaacatgttagcttcattggaataggattacaatatttttctggaacgtttatgttattttaagaatcaaaaaaaggccgcataggcctttttacattttccattattgcatttgttcaatatccgtaccctcagctgtcacattcgccttcccctgcctcctgacaagcgtcaaggccatgcccgcaaagatcattacgatgccaagcgtttgatagaggtcagggcggaaacctgtgaagacggtatcgagcacgattgcgacagcggggtcgagaaatacaatgattgaaataaatttcgttgataaaaatcgtaaactgtcaaaaaacaacaaatatacaatacccgtatggatgatgccggtagataccaccataatccagtttccctgagataggtcagcaaaagcgccaaagtgaataaacggaatcaggatgataacccctaaacccgtctgcaagaaggtggtcgtgtaaggactgagattgtgaatgccttttcccaataaagtggtgaacgcataaaacagtgcggcgagaactgcccatatgatccctgatcccatcagctgtgtcaatgaagtgctgccgttaatcccggaaatcagcgcagttcccagaaagcagatgataatggagctgacggagatcacatttaatttctctctgtagaggaagctacccagaagaagaacaagcaccggcgctagatgataaacggagatggcaattgtaacggacgtttcttcaaaagacttaaataagaacacccagttgaatacaagaaagaaaccgcacaccaatgtttgcagcacgtctctcttgctccatttttcagttttatactggccggacgccagccagcaaaggcctaaaaacagcgtcgcgcaaaggcagcggacaaagaccaattcaaatgacggcagattagtatgctctgagaaaaagccgatggagccgaaaatcaccatagagatgaccattttgattacggctgttgttgatttttgttttggtgtgattgagagatcttgctgcatcaagcgtattctacctccaattatgtatagggaaaagcaccccaactgcaaggtgcttttccttttttatagtttcttgccggccgtccagccgccgtctatgacaaagtttgaacctgtaataaagtgcgcctcatcagaagccaaatacttcatacaggaaacgatatcactcggctgcccccacgtatgaagggcatggttatctttgatcagctgaaccatttcatcgtcttgaaaatactcttccgttaattctgtttggatcacgcccggcgaaatgctattcaccctgatcccctttgatccgaactccatagcgagctgcttcgtcagtccgatgatcgcatgcttggaagacacataggcagcccgcgcaggctctgccatcagcccggacacagaggcgatgttgattatacaccctcgtttccccagctttgaccacagccttgccgcgtcccgagaaagaataaaggctgccgtgagattaatgtctatgacctttttgaatgattctgctgataattcaagaacaggggtaatttcccttatccctgctgcattgatcaaaatatccgggatcagccggcttttttcaagttttagcatcaaagattccgcctgccggacatcagacaagtctgctttttccatgtgaaactcactgtttactataaattctgacattttattcgtttgaatatccactccaacgactcgaaagccttctgttagaaattgctttaccgccgcaaagccgattccgctatttgccccagttatcattatattctttttcttcatcattttacattctgccttttttcactttggtaatttgtaataatctgaatattattatttgacaatatattacaaataatttagcattgcactacatcctctattttccacattttctatcatacaggaaattactaaaaaaaacatctactttttaaggagagattcatatggttcaagtttcaaacgtacaaaaagagttgacatccgatatttctaaatatgcttcttttttaaaggaaaacggctattcgtatatcccagcagatttctatcagcagaaaacaacagacgctgcagtccgcgaattacagcttacatatgatgatttgaaagctgattctaaaggaggcggccgttacagagcgcattcccgctacattttggctcctcactccgacactcttgaattagatccggataatggatatttccaatcaaaagaatataattatgatgatggcggtatcgtcagacaattcgaaaaaatatcagatgagtttctacagcatcctgtaacgcggcacatgatacattcaaatgtagaaatggctcgccaaaccgattttgtagattgggagaaagaagtgatcgtcgggcttcaccaagtcagatatcaagtgacacctgacgcgccttcatacagctcacccatttggctgcatcgtgacgatgaaccgcttgttttcgtccatctatttcagctgagcgaagatgctatcggaggagataacttaattgctccgtctgttaagcaaattgataaagtgctgcggctgacagacccgcttgagacacttgctctcgggcaaaaggtctttcatgcggttacaccggtcggcactgccaatagagatggtgcgcatcgagatatattattagttacattttctaacagataaaaaaagcgcccttgggcgctttttttacaaatctatcgaacaattaaaaccgggcatgttgataattgagacactttatggctgacgcttccaagcatcatttctttcaggccgctgatcccccggctgccaactacaatcaggctgacgcctttctcttttgcgtgatttagtatctcatgcgccggctcgccattcgcgtaaatggtttcagcttgaacgcctttttcggctgctttttcttttgcattctcaaggattttcaggccctcttttttaacctcgttcctgatttcatcaataaagtgttcaggcacatagacaattcccgtcagagaagaagtcgtgacgacggcttctctccccacatgaagaatgcttagttccgcttgttgctcttttgccaaatgcactgcggcatcaagcgcttttgcactcatgtctgatccgtcaatcgctactaacattttgttaaacatgctcttcccgcctttcggactgtgggtggttcatctttctcttttattgtccgcctgcatttcgttattgtcaattgaagcgcatgagttttcaaaaaattgtcagagactctctccgtttgtggcgatgacctgctgataccagttgaagctttttttcttgatgcggttaaatgttccatttccttcattgtccctgtccacataaatgaaaccgtagcgttttttcatttccgcagtagatgcgctgacaaggtcaattggcccccatgatgtgtatccgattaattcaacgccgtccgcaatggcttcgcgcgcttcaattaaatgatcacgcagatagttgattctgtaatcgtcctgaatcgtgccgtcctcttcaaccttgtctacagcgccaaggccgttttcaacaatgaacagcggcttctgataacggtcgtataaggtgttgagcgtgatgcgcaagcctttcggatcaatttgccagccccattctgatgatttgaggtaagggtttttgactccgcccagcaggttgccccctgattttgcaagctcttccggatctgtgctcgccgccatcgacatgtagtagctgaatccaatataatccaccgtatgttctttcaagagctcttcatcgccttcaaccatttcaatttcaatattgttttctgccagatagcgtttcatatatcccgggtatacgcctcttgcctgaacatctgagaagaaaagtgttttgcgctcattctccattgccgcgaagacatcctccggcttagaagtcatcggataggttgtcgttgccgctatcatacagccgattttcgaatcaggaatgatgtcgtgacccgctttgacagcaagagcactggccacaaattggtggtgtgccgcctggtacatcgcgtttaatttgttttctccttcttcaaaaacaagaccgcctccggtaaatggcgcatggagcactacgttaatttcattaaacgtcatccaatacttcactttgtgttgatagcgtttgaaaaccgttttggcatagcgttcataaaactctatgactttgcgattcttccagccgccataatttttcactaaaccgagcggcatctcataatgagagatggttacgacaggctcaatatgatgctttaacagctcatcaaacagatcatcataaaatctgaggccttcttcattgggctcctcttcatcgccattcggaaaaattctcgtccacgcaatcgatgtgcggaacgccttaaatcccatttctgcaaataaggcgatatcctctttataacgatgataaaagtcaatcccgttgtgatacagattcaaggaagtcattgattcatcaaatggagacatgatcccgttcggcgatacgtcagctgtcgaaagccccttaccaccctcgttataagcaccctccacttggttggcagcaactgcgccgccccataaaaatccttctggaaatcgtttttcatttgaactcatattgatcaccccattagttttttcaagataaagcaagcagcgcttcttttggctgcactttaccgatctctttcaccggcgaaaacgaatattggtctgtgttggtcacaatcaccggggtaatgacgtcatatcccgcggctttgatttgctccagatcaaaggacacgagcggatctcccggtgcgaccttgtcgccttctttgacgtgagccgtgaaccattgtccctccagcttcaccgtgtccaatccaatgtgtatgagtatttcagctccctgatcactcgtaatgccaattgcgtgttttgttttaaaaatggtggtaacgcttccacgaacaggcgacacaacttctccttcttcaggctcaatggcaaatccttttcccatgatcccggcagaaaatactccatctttgacttcacttaaggctttcacttctcccttaatcgggctgtgaatgatctctctgctgccctcatgcactgccggctgctggctgccgtcagaaggcacatcctcgaatccaagcaaatacgcagctgctgttcccgccgcaaacgcaatcacaaggccgatcatcgcgtaaataaacgttgggccgataaagacagggatgctcgggagacctgcattccctccgacgatataggaagcaacacccgtcatgccgtaaaacgcgccaccggctgcaccgccaatcaaagcggccgcaaacggctttttcaatcgcatattcacgccgtacatcgcaggttctgtgatccccatcagcgccgtgatgcttgtggtaagcgcgagtgatttaaattttttgtttctggagcgaaggaagacggcaaatgatgctcccgcctgccccatattcgccaaaaacatagccggcagtaaataatcgtggccgttttgagcgatgttgttgatcatgatcggcacaaaggcatagtgcatgcccgtcataatgattaaagagaatgtacccgccagcaaaatcattgccacaagccctgcatgatcaaacaaataattgaccccagaagacaagtattctcctaaaatagcgccaagcggaccgactgtaatcaatgtcagcggcacgacaatcaatagcgtgaatgtcggaaccacaatcaatttgagagatgcgtgtgtaaaacggtcaatccatttttccacgtatgaagcaatccaaatcgacagcaaaatcgggatgaccgttgacgaataagtggcagcggttacaggaagcccgataaaggaaatcggtttccccgcaccgagcagggctgtcaaatccggatgcaggatcgccgccgcaatggcagccgctacgtacggattgcttccgaattttctcgccgcactcatcgctagcaggagcggcaggaagtagaacgcaccgtcaccgacagccgtcaaaatgacatgaacctggctcttctccgccatccagccaaacgtaactgccagcgcaacaagccctttgatcatccccgctcccgcaatcgcaggcagaatcggggtaaacacaccagaaatcacatcaaagaccgcactcagcacattctttttctgagaggatgaaccagcgctcttttcatcactgagattgctgtgccgcacaatcgcctgatacaccttcggcacatcgtttccgataatgatttgaaactgctcgccgctgatattggtgcccatcactccaggcagctgctccaactgactgcgatccgccttcgaattgtcatgaagattaaaacgcagcctcgtcatgcagtggatcacgcgctgaacgttgtcttcaccgcctacgagttgtaatatgtccttcgataatttatcataatccatgtgtatacctcctttttatggggggactgctggaagaaaggtggccgcctttcaccagctttttttctatcaaatgctgcatcacctcctaaaagagaataaaaaaaacctaaatgacacagattgcgagagtctcctcctgcacctgcaccatttaggttttgcctgctttcacagtaacaatcctgacgggtcgttttatttgtttgtaggtatactttagcactagatttatcggatgtcaacgctttcatttttgagttttgactaaagggaattacttattgaggactgctttgttatagagggaagccattttgtatattttgttttatttttctgaaaatactatcaaatatatcagctgacttaatataaaagtaaaaaaccttgaaaggcaatttagcccatcaaggtatatgttttatttttgactatcccttttccatatactttctccgtcagttaaaaaaactgcacttggcggatcatcataaagtgaaatttcaactaatgaacctttcttttgtattaaccaattatataaactactttcttcactagtaggatgagctaaaatatcatttacttgaaatgtaactgcataatattcgataaaattcacatcatcgtcatccaacccattgtctgtttcaaagagtgtgtctggttcaccaataatctttaatccactatcccactctattatcaagtcactatctttatactcttttaacgcttttattaaaggatcatattccatgtatatcctcctcaagagaaaagtctctgcaatcatgccgtgagagtcagattctacagaggaaatcgcatgctgtgtttgtttcagtacttttttgtattcgtcgataaacatgccaaagaaaaggagaagggtttatgaattagctttataaaagattatttttattaaaaaaccttgaaaggcatatagccagtcaaggtatgataacaataacattatatttagaagtatcaactacttcacctactgatttatctgagagaatatcataattgttttatatattctttctaataaaataaggctattttaaagtaactccactccaacttgtttgcaaaatttaactttaagtctctcttcttgacccacattcattaccataactttgtcatctttttttatacttgttacattattaaaatcacctgtaaatactatagaatcattaaatgtaatacttagactactcgtttgcttatatacatctaaagttaaaatcaccttgaaattttggtcatctttgtaagtataaattaattctccatcatctatattgcctgttatactcaccggctcactttgaaaaagttctaatagatcatattcatcatactttataaacatttgtattcatccttttattaattatttcggtataactgtgataacatcgcctgcttcatttattattactttgacatccagtgtttcatgaacaaacgttccgcttctattaccaggtatctttttcgtattcattatagcgtcttcaataactgaaggtgaaatatttcttgggtcaacatattttttgataaaatcactaaattcttttgtttgtggtttatatcctaattcttcagcttttttaattgctctacttgttaaagtagcttttacttcaggaatatcaggtgccattctttccaaagcatgctgagaatactttcttccatttatttctcctccgccttttgacatgttccaaccaatttcacccttacccttagaagcaactttattaacctcacccttactttccttctccgcaacatgtttagccacatctgtgacaacacgcttcccgcctcggaccgccaattttttaatagcgccctgaggacttacccactcaataaattcatattgagttccggcaagaaacgaatcaattggcttagctccgcctactttatcctctggtatgtaagacacttcttctagccgctttttccctccagcatagaattctcttacgatctggccgttttcataaacataatatttgccgccgacatagtcgatgcttgcagtattgcgagttagttcgtcaatcacttctatcgtatctatcttttttaatcttttattattatatagtttatcatttatcacccgtatgtctccatagactttcgggtgagctgctgcttctttctgtaatacagttacgttactgtcatcagcatgaatctcacgctcgatcttctgttgtttgccatccttcatcacgatatcaacgttggactgcttatgtttctctattttcttcagcatcatctccatcggtgaatcatccggctgcttcatttgcgagttaatgccgccgaaggtttggttgatgttttcttcttcctgtgatttcaggatagagccgcttttgtagcctgtgatttcaattttcggaccggtatacatggttccgagctggtctatatattttttcatcgtttgaaaatctgattttgcggtttctaatgcttgggtttgctggccgtcaaattgaaagagcttattcagggtgtctgaaatcagccgctcagcctgttctgtttccatccgaaaaaaggaatcattgactgtcggcaggctgacgatgtgatcgatggctgatgtttggcgattgactgcgtcagtgagctgctctgtcacttctcgtgcatgcttgaccccatgtctcgcatcgtgtgagagaaaagcctctgcgatcatgccgtgggagtcagattctacagaggaaatcgcatgctgggtttgtttcagcacttttttgtattcgtcgataaacatgccaaagaaaaggagaaaaggcttgtggcactcctcgtaaaaggtccggatggcatctccgccttttcctttcagcgcatccctcatgcctgccagatgctcaacgcttttttccagcttctccagctgttgtttttgcttgtccagtttctcaatcgtatgctgaatgccctcgtgaagagcgtggacatctaatgttttcaatcccttgtcctcccgcgctttatttcatggaagatgatatgttttcgtccgtttccttcatggcgtttaccgcgctttccgtttgtgcgatatgcttggccagaacagacgcatatgcttcagtgagctctttgatgtccttatttaattgctcgatggacttcacaacattcaaatggtttctgcctgagagatggccgggtaaggaggacttgagttcagctgaattcttgagctgagaaagcccttgcttcactgtgccatacaccattttaatttcctgtgccatttgtgctcacctcactttttatgtttttctttctctatttcatgctctatcctcgtaatttggcgtcttatggaatagacatcgccctctaatgagtggatttttccttctatgctttcgatgattccgttgacttgatcgcttttgatttgctgatatgctttgttcattccttcacgaatatcttcaaaccgctgagcatgtgttcctctccatgcctcccggttaagatgaggccggtgaatgagatgctgggcctcggagaattcgtgtttgatttgcctgatttcgtgcagcactcgttttaattgatggatctgttcctgcttttcatgtaagtcggcttttaccgaatgtaacaacatttcactatgcatgccgcaacacctcgtgtttctatcaaactgtgtcaattctttacaatacagactattttcatattacatgatgggtcatattggataaataggtaaaaaggattgtcttgaggaactttataccggttctaaatagctaaaaattcaatttcataactttgtaagagggagaatcatcatattggggacttttcgtttaggtcttgaaccccgcaatcacttctgttttttctctcgctcaaccatttcttatagtcaataaagctcataaaaaagcgccttctctagaaggcgccttctccatcttatttagatccccatacagcctcaccgttgccattcaaaacactaaacgtcatgacgttcttctctctcaccgaatcccactggcgtaaaaataccccgttatacttcttgccagctaacgtgatgtcgactgtgttttttccggttttctgccatgttccggtcatttccccggaaatggtgtggtttttgttgagctggataatgatggtttgtttgatgtcggctgagatgtcttttccgtgctggataagtttgtatgttcctgtgatgtctttttgttttacttctttcaatgtttcgcccgcataacgatatggtgctgctaccggccagccgtctttgttcatgaacaattggtggactctgacttcgtgttcttcacccctgcccgggaagcgggtgtggaagattaaataggaacgcccggttttttcatcatagtatgcggagttgtggcctggtgagacgtacccggtgcctttttcattttctgtttcaaaagtgtagctgcccatgagtttgacgccgtatggttcgatggaacggtcgtcgaagaatgtgccttctttgccgcggacgtcaagcattggattgccttctgcatcatagtaagggccgtctggtttcttggagcggaccacacggatgttatagccgcctgttgcatcaagaccgccatatgataggtataagtagtagtatttggtgtctggattgtagagaacatacgggccttcgattctgctatggttgccgccgagcagttttttcccgtatccctgtccaggaagcgggaagcccgttttcggattcatttcaagtatgaaaatgccgcctgagtatgatccgtacaccatccacagcttgccgtctttatcaaagaaggtatgcgggtcgacgacattcggatgtttggttgcgtcatacggtgttccatcgttgcttgtgccttccattcctgatttcaaaaagatgcctttgtttttgtatgggccttcgatgttgtcagcaacggcaacacccatggcggatcttggcgaatcgccgcggcaggcgttgtagtacatgtagtatttgccgtccgccagctgcgtgacgtcagccgcccaaagagtatcggattgcgcccattcgaaggtttcttttaattctttatagacattcgggataagtgggttgtcattgcttacgctggtggtcagctgctgccattgcatgaggtcattcgatttagctgaagcgagatgagatccaaaaacataaaaagtgccgtttgtttcaatgatggaagggtcatggacgctgacttctttaaatataggtttttgtgcatagacggagtttgggagggtgaaggccatgataagagctgcaagaaaacatacacagaacaatcggttgaacatctaaacaattcgcctctcttttttattaaattttaaacgcttacatttccctatgaagataccccggcctattaaaacagccgaatgttttcatattcaaacagataggtgatttctcactgttctcttacatagtcagactgatgtctgtctgttttgcgcagaactgctgcttgcatacctctattcatagttcaacccttttgccgtttctccttcttcaattacttctgtttcttcatttgcgtacataatgaacgctttgtccggtcttgtaaagtcgtcgacttttctccggcaacttcgcctctttttggcattttacctctcattgtcagcaatatgacagcggccgcttgcacttctgtctgggtatgcgtgtgcaatgtgctgctttctgcgtcacactattacaatagcaatctaacttgttaaagactgtaaaaaaccttttgacttctgctgctgaaccaattaatataatactcagttaatagttatcagaatttttaggaattgagtgattcatatgacactgcataaagagcgtcggatcggccggctgtctgttctcctgctgctgaatgaggcggaaaaaagtacgcaggttgaggagctggagcgagacggatggaaggtctgtcttggcaaggtaggatcaatggacgcgcataaagtagtagctgcaattgaaaccacttccaaaaagagcggtgtcattcaatctgagggttatcgggagtcacatgcgctttatcatgcgacgatggaggctttgcatggcgtgaccagaggtgaaatgctgctgggatcgctgcttcggacggtgggcttgaggtttgccgttttgaggggaaatccttatgaaagtgaagcggaaggcgattggattgctgtctcgctttacggaacaatcggggcgccgattaaaggtcttgagcacgaaacattcggtgttggaattaatcacatatgaaacagcccatagatcttagacaatagggggctatgcgtgaaaacagatgttcacagcatagctcctttttgtatgggcgctttaccaaagtaaagaaaaaggagttgggcttatggtgactttagacggttcttcattgacaacagccgacgtcgctcgtgtgctgtttgattttgaggaggcagcggcttccgaggaaagtatggagcgcgtgaaaaaaagcagagcggcagtggaacggattgtacgcgacgaaaagacaatctacggcatcaacaccggatttggcaaattcagcgatgtcctgattcagaaagaagactcggcggcgctgcagctgaatttaattctttctcatgcctgcggagtcggcgatccttttcccgagtgtgtgtccagggcaatgctgcttttgcgcgccaatgcgctgttaaaaggcttttccggtgtccgcgctgagctgatcgaacagttgcttgcttttttaaataaacgcgtccatcctgtcatccctcagcaaggatcacttggcgctagcggagatttggcgccgctttcccacctggcgcttgcgctgatcggacaaggagaagtcttttttgagggggaaagaatgccggcaatgacaggcttgaaaaaagcaggtattcaaccggtaacgctgacatccaaggaagggcttgccttgattaacgggactcaggccatgactgcaatgggggtggtcgcctacattgaagctgagaaactagcctatcaaacagaacgcattgccagcttaacgattgaaggtttgcggggaattatcgatgcatttgacgaggatattcactcagcacgcggctatcaggagcagatcgatgtcgcagaacgaattcgcttttatctatctaacagcggcctgacaacctcccagggagaactgagggttcaggatgcctattcattgcgctgtattccgcaagtacacggtgcgacttggcagacactaggctatgtcaaagaaaaattagagattgaaatgaacgcagctacagacaatcccctcattttcaatgacggtgacaaagtgatttccggcggaaactttcacggacagccgatcgcctttgccatggattttctgaaaatcgcaatatcagagcttgcgaatatcgcagagcgccggatcgaacgacttgtgaatccgcagctgaatgacctgccgccgttcctgagccctcatcccggtctgcaatccggtgcaatgatcatgcagtatgccgcggcctcactcgtttctgaaaataaaacactggcccatccggcaagtgtggattccattccgtcatccgccaaccaagaggaccatgtcagcatgggaaccatcgccgctcggcatgcttatcatgtgatcgcaaatacaaggagagtcattgcgatcgaagcgatttgcgcattgcaggctgttgaatacagaggcatagaacatgcagcgtcctatacgaaacagctttttcaagaaatgagaaaagtcgtgccgtccattcagcaggatcgtgttttttcctatgacattgaacgcttgactgactggctgaagaaagaatctttaatacctgaccatcagaataaagaactaagggggatgaacatatgactgatgtaaaaaaatcaatccgtgccaacagaggaacagagcttgaatgcttaggatgggagcaagaggcagtgcttcggatgcttcgaaacaaccttgatccagaagtcgccgagaagccggaggacctcatcgtatatggcgggattggcaaagccgcacgggattgggacgcttttcacgccattgagcattccttgaaaacattaaaaaatgatgaaacattgctcgtgcaatccggaaagcccgttggcatgttccgtacacacccgcaggccccgcgcgtgctcctagcaaattctgttcttgttccgaagtgggcagactgggagcatttccacgaacttgagaaaaaagggttaatgatgtacggacagatgacggctggaagctggatttacattggctcacaaggcatattgcaaggaacctatgaaaccttcgctgagttggcgcgacagcacttcggaggcagcttaaaaggaacgttgacgctgacagcgggtctcggcggaatgggaggcgcacagccgctgtctgtcacgatgaatgaaggcgtcgtcattgctgtcgaggttgacgagaaacgcatcgacaagcggatcgaaacaaaatactgcgatcgaaaaacagcatcgattgaggaagccttagcttgggctgaagaggcaaagctggcaggaaaacctttgtccattgcacttctcggaaacgcagctgagatgcatcacacaattttgaaccgaggcgtcaaaattgatattgtgacagatcagacatctgcccatgaccctttaatcggttatgttcccgagggctattcccttgatgaagctgaccgtttgcgtcaagacaatccagagctttacgtgcgccttgcgaagcaaagcatgaaaaaacatgtcgaagccatgctggcctttcagcaaaagggctctattgtatttgactacggcaacaatatccggcaagtcgcaaaggatgaagggctggagaatgccttcgattttccggggtttgtccctgcctacatccgccctttattctgtgaaggaaaagggccgttccgttgggcggcgctttccggagatccggcagatatttaccgtacggatgcgttattaaaagagctgttcccgacaaataaagcccttcaccgctggattgatatggcacaggaaaaagtcaccttccaaggcttgccgtcccgtatttgctggcttggatatggagaacgaaaaaagatgggcctcgccattaacgagctggttagaagcggggagctaaaagcgcctgtcgttattgggagagatcatttggactgcgggtctgtcgcctctccaaaccgggagacagaagcgatgaaggacggaagtgacgctgttggtgactgggctgtgctaaatgcgcttgtcaacacggcggcgggtgcaagctgggtttctttccaccatggcggcggcgtcggaatgggctattccctgcatgccggcatggttgcagtggccgatggaagtgagctggctgacgagcggctcgcgcgggtcttaacgagcgacccaggaatgggcattatccgtcatgcggatgcgggttatgaacgtgccgttgaagtagcgaaggaacaggacattatcgtgccgatgcaaaaataaaggagtgatgacatgccaaagcaaattgatacgattctcatcaacatcggtcagcttttgacgatggaaagcagcggtccgcgggcaggcaaaagcatgcaggatcttcatgtgatcgaagacgctgttgtcggcatccatgaacagaaaattgtgttcgccggacaaaaaggggctgaagccggttacgaggcagacgaaatcattgactgttcgggacgccttgtaacgcccggcctcgttgatccgcacacccatcttgtatttggcggatctcgtgaaaaggagatgaaccttaagcttcagggcatttcatatttggatattctggcgcagggcggcgggattctgtctacagtcaaggataccagggcggcttcagaagaagagctgctgcaaaaagcccattttcatctgcaaagaatgctgtcctacggctcaaccacagcagaagtgaaaagcggctacggcttggaaaaagagacagagctcaaacagttgcgtgtcgcaaagaaactgcatgaaagccagcctgttgaccttgtttccacatttatgggagcccatgcgattcctcccgaatatcaaaacgatccagatgaatttctggatcaaatgctttcccttttgccggaaatcaaagagcaggagctcaccagctttgctgatatttttacagaaacaggcgtttttacagtcagccaatcccgccgttatttacaaaaagcagctgaggcaggcttcggattaaaaatacacgcagatgaaatcgatccgcttggaggcgctgaattagcaggtgagctaaaggccgtctcagccgaccatttggtaggtgcatcggacgaaggcataaagaaattggctgaggcaggaacgatcgccgtcctcttgccgggcacgacattttatcttggcaaaagcacatacgctagggctagagctatgattgatgaaggtgtatgtgtcagcttggcaacggattttaatcctggcagctcgccgactgaaaatatccagctgattatgtccattgccgcgcttcatctgaaaatgactgcagaagaaatttggcatgcggtcacagtcaatgccgcatacgccatagggaaaggagaggaagccggtcagctcaaagtcggccgctcagctgatctagtcatttggcaagcctcgaactatatgtatattccgtatcactacggggtcaatcatgtacatcaagtcatgaaaaacggaacaattgttgtcaacagggagggagccattcttggataagtacccttttctcagagaggccggatcttcgtttaaagaccgggatgtcacaaaaatgagcgacctgatcgcaacatgggacggccaggacattaagggaccggcgttgataggtgtccccctatcaaaatcctccatcagtcattcaggcgcttcctttgcacccggaacaatacgccaggctctgaaacattcatcagcctattctgctgagcttggagagcatgtcgtatcagagcttctatatgatctgggggatatcgatattcatgtcactgatatcgtaaagtcacatcatcacattttccaaaccatgcacgctctgctttcggaccatcccgattgggtgccgctcatacttgggggagataactctatcagctactccacaataaaagcgatagcacaaacaaaaggaacgacagcagtgattcaatttgatgcccatcacgatgttcgcaatacggaggacggggggccgacaaacggcacccccttccgccgccttttggatgaagagattattaaaggccaacatttgatccagctcggtatcagagaattcagcaacagccaggcctatgaagcatatgcaaaaaaacatagcgtgaacattcacacgatggacatgatccgggaaaaaggactgatcccaacgataaaagagattttgcctgccgttcaagatagaacagatttcatttttatatctgttgacatggatgtcttagaccagtcccatgcacccggctgtccagcgattggcccgggcggcctctatacagaagaattgcttgaagcagtcaagtatatcgcacaacagcccaatgttgccgggattgaaattgttgaagtcgatcctaccctcgattttcgagatatgacaagcagagctgcagctcatgttctgttacacgcattaaaaggaatgaaactctccccattcaagtgatcttctggcaggttgtattttgggtataagaaactcatctgcctaatgaatggcagctaaaaggagggcgagacagtgaatcttcaggagaacagcagccaacagctaaaacgcacaatgaaaagcaggcacctatttatgatctcattgggaggcgtcataggcacaggacttttcctcagtacgggctatacgctacatcaagccggacccggcggtacgatactcgcttatgtaatcggcgggttgatgatgtacctcgtcatgcaatgtctcggcgaattgtcggttgccatgccggtgaccggctcttttcaaaaatatgctacaacatttattggtccatctaccggttttatggtcggcatcatgtactggatcaattgggtggtgacggtaggctctgagtttaccgcatccggtattctcatgcagcgctggttccctgacagcagtgtatggatgtggagtgcgatttttgcagcccttctttttatatgcaacgcattttcagttaagttatttgcggaaactgaattttggttttccagcgtaaagattgtcaccattattttatttatcattctaggaggagccgccatgtttggcctgatctctttaaacggaacggcggatgctcctatgttgtcaaacttcacggaccatggcgggctgtttccgaatggctttcttgccgtttttatcgcgatgatatctgtgagttttgccttttctggtacagagttaatcggcgttacagcaggagaatcagcaaatcctcaaaaggatattccgcgatccatccgtaatgtcgcatggagaaccgtgatttttttcattggcgctgtcttcatattatccggattgatttcgtggaaggacgcaggcgtgattgaaagcccttttgtagccgtatttgcggagatcggaatcccttacgctgctgatattatgaatttcgtgatattaacagccttgctgtctgtcgccaactcaggcttatatgcttcgacccgtatgatgtggtcgttagcaaatgaaaacatgatcagctcccgttttaagaaagtgacctctaaaggcattcctttaaatgccttaatgatcagtatggctgtatcttgtttatctctcgtttccagtatcgtggcccctggaactgtctatgtggtgatggtcgcaattgctggatttgcaggagtcgtggtctggatgagcattgccttgtcccaactcttgtttcgaaagagatttctgaaaaaaggggggaatgtaaaagatctgacatttcgcacgccgctttaccctcttatgcctatagccgctcttttattatgctcagcttcttgtattggtcttgcttttgatcccaatcaaagaatcgcacttttctgtggagttccttgtatcatcctttgctatctgatctaccatttcaaaagaaatgtttcaaaagcgaaaaaaatcagccaagaggaatatccggccgatcacatcctgtaattaaaaaagcacaccccgctcaggatgggatgtgctttattttttattcagtaatcaacgtatgaatcagcttcggcgccttcgcttccgcggcgaggcggatgttgtcatagacttttgcgatgacttcatcgacgttttcgcggttggcgtaaagcgtcacgagcggttcgcctttttctactttgtcgccgacctttttgtggagcatgatgccgacggctaaatcgatctcatcttcttttgtggcgcgaccggcacctaacagcatcgccgcgacgccgatttcgtccgcaacgatttcagagacgacacccgcttctttggcaggcacatcaatttgatatgcggcttgcggaagcttagacggatcgtcaacaattgagctgtcgccgccttggtttttcaggaaatccttgaatttctcaagtgctttgccgtttttcatgacttcttccagcttcgctctcgcttcgtccaatgtatcggcttttttcgcaagcacaaccatctggctgccgagcgttaagacaagctcatgaagatcctcgggtccctcgcctttgagcgtgtcgatcgcttctttgacttcaagcgcatttccgatcgcaaagccgagcggctgggacatgtctgaaatgacagccattgtttgacggccgacgttatttccgatgcgtaccatcgctttggcaagttcagctgcgtcttcttctgttttcatgaaggcgcccgctcccgtttttacgtcaagcacgatggcgtccgccccggcagcgatttttttgctcataatcgagcttgcaatgagcggaatggaattgaccgttcccgttacatcacgaagcgcgtacagttttttatcagccggcgttaaattgccgctttggccgatgaccgcaaccttgtcgcggttcacaagtttaataaattcatccttcgtcagttccacgtggaagccgtcgattgcctctaacttatcaatcgtgccgcccgtatggccgaggccgcggccggacattttggcaaccggtacgtcaagagccgcaacaagcggagcgagaacgagtgttgtcgtgtcgccgacgccgccggtggagtgtttatccactttaattccttcaatggcagaaagatcaatcgtttcaccggagttcaccatagccatcgtcaagtccgcgcgttcacggtcactcatatcctggaagaaaatcgccatagcaagcgcgcttgcctgataatcaggaatgcttccgtctgtatagccgttcacgaaaaattgaatttcttcagtggtgagttcttttccgttttgttttttgatgatgatatctaccattctcatgtttggtcaccgatccttttcgattaagttcagtaaatcaagcccacaattgctgctgataaaaagctgacaagcgtagcaccgtataataatttcaagccgaaacgagcgacgacatttccttgcttttcattcagtccttttacggcaccggcaatgattccgattgaggagaagttcgcaaatgacacaaggaataccgatacgatcgctgttgtacggccgctgaaatggaaaccgttttgcgtaagcgacgtcatggcgacaaattcattcgataccatttttgttgccataatgcttccagcattaacagcttcattccatgggataccgacaagaaaagcgaatggagcaaacacatatccaagaatgccttggaacgaaataccgaatactgcattaaaaatgccattgatcaaggcaataatcgcgacaaatccaatcagcatcgcagcgacgacaaccgctactttgaaaccgtcaaggatgtattctccgagcacttcgaagaaggattgtttttcttcttcctcaacacgaagcatatcctcttcttttgcaacctcgtacggattaataatagaagcaattatgaaaccgccaaataagttcaagaccagcgctgttacaacatattccggtttcagcatggtcatatacgcgccgacaatcgacattgacacagttgacatcgcagatgcgcaaagcgtgtacaagcgctgctgatttaaaagaccgagttctttcttcaaggagataaatacttctgactgccctaaaatcgcagaagccactgcgttatacgattccaatcttcccataccgtttaccttgctgagggcaaggccgatatatctaatgataaacgggaggactttccacttttgcagaatcccgatcagagcggaaataaacacgattggcaagagaacattcataaagaatgtcgtttggtccgcattcaccaagccgccaaacacaaagttaattccctcagccgcgtattcaagcagataaccgaatccttttgcaaatcctcccacgagaaaattccctatcccggtattgaggagaatgtagccaagaataaattgcaaaatgagcataacaacaattgggcggatcttaattctttttttgccgctgctcgcgatccacgcgaggcctaaaaacacgattaaaccgataatcccaatcaaatacttcatatgtgtttctcctttatttgtattcgcttacaatcactgtttcctcagaaaacggaaagcagtctgccttccgtcagctcttaatagttgtctccgcctgatgcattttctccttttacgatagaaacgcctgcgctggcgccaattcggcttgctccggcctctaccattgtgtctacatcttctttcgttctgacgccgccagatgctttcacgccgatatcaggtcctactgttttgcgcattaaggcgatatcttccttcgttgcgccgcctgtagaaaagcctgttgatgtttttacgaaatccgctcccgcagacaccgctaaacggcatgcacgttctttttcttcatcagtcagaaggcacgtttcgataatgactttgacaagcgcttttccggctgcagcttccactacaccgcggatatcagcttccaccacatcgtcttccttgtcttttaaagcggcaatattaatgaccatatccacttcagtggcgccttttgaaatggcgtcttttgtttcgaatgcttttgtttcagttgtattggcaccgagcgggaagccgatgaccgtacaaacgtcgactccagttcccttaagctcttttgcagcaagctccacccatgtcggattgacacatactgaagcaaatttgtatgttttcgcttcttcaattagttttagaatgtccgctttttgtgtatgcggtttcaaagctgtatgatcaattatgttggctaatgacatccttcgcacacttccttttttgttaagatattttttagcataaccgacttttgaacatatgtaaattggtaattgaaattttgttcaacgaaaggtttgaacgtgtcacaaatcattaacaagcgccctcgcggtatgctggtcaatgattaaaacgttggcatattttccggttaatgctccgtgaatggaagatacttttctgcttccgccggcaactaaaatggagcgttccttcagcctgaggtcttcaagctcaacaccgatggtccggtcattgatggcgctgctgcaaatattccctttcgcatcaaaaaagcgtgaacaaatatcccccacggcctgttttttcagcagggctttctcttcttcgttaaaatatccgagtcggaacaacagcgcttcatcacggacagtccccaccgtgaagagagcaatattcgcctgctttcccatctcgatgatccgctcaatatgacggtctttctccaccattcgcttcacatccgcattatcaaacacgacgggaagcggaagatagcgcggcatcgtttgaaaagcctctgcaaacagctgaatcgtttcagccgaatacgtgtttacccgggaatggctgatgccgccttttagctggacgacctcgacgccttttacctgcttcggttgcatgttttgcgcgatttgatacatggtggttccccagctgacgccgacaatgtcgccgtcttttaccgtttcatgcatatattctgcaccatagcggcttaggtcatgtgtaattcctgcataatcgggtgtcggggaaaacacaacatgcgcctcaaggagcccgtatttctcttcaagtatggaaccgagcgcatccaaatcctcaaaagggtccatgacgcgaatctggacataccctttttcctttgcatattgcagcagccgggaaacggttggccttgaaatgttgagctgctcagcaatttgctgctgactgtagtcagactgatagtaaagccttgccgcttctatgcttaattgttgtttttcccgatccattccgcacctccctgtggatcagtcctgataaaactgcttttgatttgcttttattatacaggctggcgccggctttcatccacctgatttctaagaaactgaaaaacgctctgggcgcggacctgcccagagcttacttctcccaagtcatatgctgataaatgcctttcataatggcgtacattccatataggatcaggcctaatgccaatatagacagaatcaatttgccatgcggctgctgcgcgagttcggcgagcgcgccgtcaaagcctcttgtgtcgtcgggatcagcggtcatggctgtcttgatgagaaaatagccgatggctgagaaaataatggcgcgggcgatattgcctgcgcgcccggtgtttttcgtgatgcatatcatctgtttgttcatttttgatgtatcgaattctttcataaaagcagcccgaacgcctttcataaattgaacaatcgcaaatacgataaaacccgcacccgtaagccctgtgagccatcggccgaatggctgcgccaatacataagcggaccacgtctgttctgaagtgccgccgtccccttggccaaacacaaatcgcaaggcattccaagcgatggatgtgtaaacggcggcactgaaaaagtttcctattctccgtgacaggcctcgcctgctatttccgtgcccctccgtgtccttgatcgcacttaacaccatccagattacatagccgataaggccgatgcctattaaaaaaagcaatagtgacccatacggcatgcgtgatagcgtttggagagctccgctcgaatctttggcgcggcctgccccggcagccgtcataaaagccaaaaccccaagcagaataaaaacgccgccgaatgcaaaataaccaagcctcccgaatcgtttgatccaaggcttggtttcctgttttatttttgacatgtaccggtctttcaccgccatgtgtccaaccctctttcacagaaatctttactgtaacattcccgattggacaaagttgaaacagcttctgcctcagctatggctggctgagatatgtttttgctgtttagctgattgtgcaggtgtcatccaagcagccgctgcggcagctgtgactccgcctgctaatttcccaatgatcatggccgccgccatttcttttttcattccagccacaaaaccgaggtggctgccgagtacaaaagcgccgctgaccgcaaacgcgacattgatgacctttcctctcggcgtcatatcctttaatgaagccagcattgggatatggtgcgccaaagaggtcaccaagcctgcagttgctgtctcatctaaatgaaggcatttccccagagcctgtagcggttttttaaaggtttttgtaataaaagccgtcattggaaacgcccctgccaaggcaatggcgatggtccctgttgtttgtatccctgtctcgacattctccattcccggaatcagcacaataccggtcatcgtttcaacggagacagctgcaagcccgataatcgcaaccacactgaccgctttcccgaagagatgaaacaactgaatcatactgtcggtgtatcgccataacccaaaagcgatcacagcagataacagactcgggatcagaaggtttttacctatcatgccgatgtcaaagcctgcgcataatccgccgattaagcaaccgatcggcactgtgcacagcccgattaatatgcctttcgcaaaatacggatgatcctctttttcgatgatgccaagagcgacgggaatcgtgaagacgattgccggtcccatcattgttcctaaaaacacccatgaaaacagcccggcctgcggatctttcgccatttctccagccagcgcatatcctcccatatcaatcgccaaaatggtgttcgcaaaggaagaagggtccgcgccaatcgctgtgtaaaacggagcaacaatgggaatcaggattgctgccagcacgggcgccagcgacacaattccgatcatggacagcgccagcggccccatagccttaaagccgtccgcaaaccgctcgcctagcccccatctgtttcccaaacaataatccgccgctccccatagtaaaaaggcagccaaaatgaatacaaccgtgtcattcaccgtcatggttttctcctttttcaaacgtatgattggttttatcatatcatctgaaatcaccgaatagagttgatcttattcaatatgagctaaaaattcttttatatcggctttttcaacggctgttatgatgctccgcgctttttcttgcgggaccgttaatgtcaatttttctattatgtcttcttcagacagctcatttcctggcgccccttttgggcagtccacacgcgcttcgcaaatccggccgtctgataaataggcccggacaatcgtgaaacggccttttggaacggcatgaggagccggctgaatagcattgtcatatacgcgctgaattcgccccattgtcgtttgaaccccgcttgggatcggctggctgctgaaatgttcaacggtcaggccgtgtccatgcaaagcaagagcaatcacatattcaacgctgaaacggccttcctctccagtttttggagatctttccgtcaatgcagcatctccgcctggcggaaatatcacttcaatacgttcggtattggcagcagaaatggtttcttcggagataagctgtcgtaccgcatctgcagcatggtgtgccgcggaacaaaatggatagattttaaaccatagacccggctgcacaattctccacggtgccccccaatcgtttagcaaagtgtgttgtgctttctcaacgtcaccgtacagactgaagaaaccagtttctccatcaaatgccgtgcgggacccgccaaattctgattgggccagcttaacggccagcaagccagcctgagccgccaaaccggcgtgcagcggtttcatttctgttccaaattgcaccctcatcccagcagattgcgtagccgcaaaaccaattgctttttccagctcttcctgagtcagctcctcagcataacctacggcgcaggcagcagcgatggcaccaagcgttcctgtattatgccagcccttttcatagtggcggctgccaattgattctcccagccgtgccatcacttcaacaccaacaatataagcgccaagaagccgctcgtcatgtccgcgagcggcagatgcaataagggccggtacgatgactgcactggggtgtcctcttacatcggagtggacatcatcaaaatccaatgcatgggcgataaatccattgagcatcgcggattgtaatggcgcggcctttttgccctgtccgataataggaacaaggggcaggcctccttcatcctctatcagacggaggagcttttgaattcctttatcttctcttcctgcgaatgaagcggcagtaaaatcaagtaatcccttttttgcttcgtgaatcgcgtcaactgaatgctcaggttgtgacgttctcacagcctctgcaagacctgctgtcagcccttgtttgctcatttgatggtctccaatacaataaccgccagctccgcaaagtattgagaggcaaccgtaagggcttcttcatccagtgtaaaggccggatgatgccactcctccgtcccgttcgttcccatccagacaaaaaatcccggaatcttctcttgatacagagcgaagtcttctccgcccggagactgctcagcgtgaacggtttgatagccaagccgtgccgcagcttcggatgccgcattcaaaaatgtgccgtcattctgaacggaaggcaaataaggaaaccacttgaattctgcttgtgccccatagcccgctgcaattcctttagccactcgtctcatatgctcgggaacagcctgcctcgcttctttttgaaaggttcgaaccgtcccttccatttcagcttggtctggaatcacgttccacgacgtgcccgcctgtactcttgtgatactgacgactgcgttttgcagtgagctgatattgcggctgaccacagattgcagcccgctgatgatttgtccggctgcagcgattggatcaatactgttatttgggatgccggcgtgtccgcctttccctttgatgacgatctcaaaccggtcaacacttgccataagcggaccttcctttacaccaatggttccgacaggcagatccggcttattgtgcatgccgaaaatcgcggaaatgccatcaagtacaccagcttctatgacctttcttgctcctgcggcaatttcttcggccggctgaaagataaagcggactgtacctttcagctcggcctttctttgattcagcaacatcgctgtgccaataatagaagcagtatgaaaatcgtgtccacatgcatgcattgtgccatcaaccttagatgcaaatgggagattcgtctgttcttggatcgggagcgcgtcaatgtccgctcgtattgctatcacggggccgtcttcccgtcctttgatttctgcaatcacaccagtctccaattgaggaacatcaagtatttcgatttgctcctcctcaagccagcggcggatttttttcgtcgtttcaatctcttgaaatgacagttcaggatgttcatgaagatcacgccgcatattgattaaacgggtatgaaacgttttgtcggccattgttcttctctccttcttatataagctctgcaggctctcccacctgcttgataaatcgtttcgtccgttcgtttttcggatggtcaaacaattcctctggcgttccctgctcgataatatggccgtctgccataaaaatcactttatcagcaacctcttttgcaaacgccatttcgtgtgtaacaatgatcatcgttgtttgtttttccgcaatggacttgatgacctgaagcacccctgtgacgagctcagggtcaagcgctgacgttggttcatccagcaaaatcgcatgcggattgaccgcaagcgcccgcgcgatgccgattcgctgctgctggccgccggacattgtgatcggatagctatcagccttatgctccagaccgacttgtttcagaatctccattccaatacgtttcgcttcgtcgcgtggtttatgttgagccacgattaaagcttctgtaatgttttgcagagccgttttatttttaaacagattgtagttttgaaagaccatggccgtttgctggcgaagccgatatgcttccttgcgtgtaaacttttccgcgttcagtttggcttctccgatttcaataagtccttgatccggacgctctaataaatttaagcaccggagaagcgttgactttccggaaccggacggaccgatgattgccaccacttctccgcgtttcacttctagatcgattccgtcgagcacgacgagatctttaaacgctttgcgaatattttttactgttatcaactgatttcacctctaagtccggtatggcttgctcatggcacgttcaaacaagtcctgcaacatgctgtagatcatggtaagaacccaatagacgatcgcaaccgccaagtacgtctcaaaatatttgaggtttcctgaagcgtacatcttcccttgggcgaacatctccatgacccctaatgtaaaggccagtgacgtttctttcaggagcccgataaatgtattgcccgttgccggaatcgcatttcggatcgcttgcggcaaaataatccgtctgtatgcctgaaattttgtcataccgacagacaggcacgcctccagttgcccgtcatcaacagaattgagggcagcccggaagatttctgccaaatatgctgcattttttaagcttaacccgatgatagcggctgtgagagctgtcattttgctcatctctggaaatagctgcggcagcccgtaatagattaagaacagctgcaccagtgtcggtacgcctcggaaaaaggatatatacagctttgacagctgatgaagcactggaattttgttctttgtaatgagtgcgagaataagtcctccgataatggcaaaaatcatagctgctatggccataaacaacgtgatcggaagggcctgaattaaagtcgggaacgctgatatcatgaattcccaatcaatcgtgttcattctggtgagtcaccgccgtttcttaatgcttctgttctactgtgatatcttcattaaagtatttttcagagagttttttcagtgttccgtctttacgcaattcatctagcgccttattgacttttttgcggagcttgtcgtgcgcatcgtccttggcaaatgggaatgcaacctgttcgtaaacaatcggatctcctgcaagctttaatggcaaaccggtcttcttgatttgcgcgatcaatacagttcggctgttgacataagcgtctacacggccgtacgcaacatccttcagcgtaccctcttgtgtttcgtacgttttgatattgatttttttatcaggatctttgctttcaaggtttttcgcgtggtttgaaccgagaacggctgcgactgtcttgccttttaaatcgtctactgatttgatgtctgtattgtcttttttgacgacaatctgtgttcccgcataagcgtatggtttcgtaaagttatacgtttccttacgttcgtctgtcacagctacctggttagaaatggtgtcaagcttgcctgtttgaagctcccccatcagcccgctgaattcaagcagcttccagtccagtttcatgtcaattttcttagcgaccgcttccatcacttccacgtcaaaacctgtcagctttccgttttctttataagcaaatgggtaactttgtcctgtcgcaccgacatgaagcacattgtcatcctctttactgctgctgtttccattgccgcaagctgagagcaccgctaataatgcagcaacgaccagcacaatccattttttcattttcatttgattttcccgccttttctttttttatagatcatgtcgcaattgttttttcatatagactgtgatatgcccttttccaaggtcttgttcacctgagcggacatacccttttcgttcgtacatctctatcagccacggatgcttatccgctgttccgagtgagacaaacggaacctttaacgtatcgcgaaggattgtttcctccagccattgaagcagctttgttccgattccttttttaccggtgtcggggtccacagcgaaccaccagatatgcggaacgccatacggtcccggctgttttccccaaggcattctcaaggtgatggtcgcgatgatccgcccgtcttcttccatgacgtagcaagcgtttttccgaatattttgcagcaccaaatctaaatccgcatgagcagcagcaaaacgaatgccaagctttcgaatcggttcataagcccgcaatgtcagcgcgaggagctgttcagcatcacgttcaactgcaaggcgatattgtggcttcatctagcgttcctccttactttgcatagcggtttaccggcttttccaaaccgaagtgctctcgtaatgttgtgccttcatattcttttctgaacacgccgcgctcctgtaaaatcggaactacttgatcaacaaacacttcaattccttctggaagaagcggaggcatgatgttaaacccgtcacacgctttcttatccacccattcctgcatcttgtcggcgagctgctccggcgtgccgacgaagatatggtggcctctggagcctgcaacgtatttgtaaagctctcgtatcgtcatattgtccctttcagccatttcctgaacaagcttgaagcggctcttcaccgcattagaagcttctgcgtcaagcttcggcagcggcccatcaagcggatatgccgacaaatcaattccgcctaagtaattttggagaatttgcagaccgacagatgggataatcagatcttgaagctccttgtatttggcttgcgctgcttcttctgtatcggcaatgattgggaaaatacccggcatgatggcaattttttctggatcacgtccgaattccgctgcctgttctttaatggattgataaaattcctgagctgattccaggtggttttgtgctgtgaagatcacttctgctgttctggcagccaacgcttttccgtctcctgatgatcctgcctggataatgaccggctggccctgcggcgttcttgaaacgttcagaggtccgcgaaccgagaaatattctcctttgtggttcagctcgtgcattttttctttgtcaaagaattcacccgtttctttattacggataaaggcgtcctcttcccatgaatcccaaagcccctttacaacttcgacaaattcctctgcccgctgataacgcaaatggtgttcaaggtgcttttcaccgctgaaattcagcgctgttgattcaatagatgaagtgacgacgttccatccggcacggccgttggacagatgatccaatgacgcaaactgtctggcaatatggaatggctcgctgtatgtagtggaggctgttgctgtcagtccgatttttgatgtgacctgcgccaaagcagagagcagggtgaatggctcaaaccttgttaatacatttggatgtgatttgctgtcaattgaaaggctgtccgctaaaaacagcatatccagcttgccccgctccgctgttttcgcaagctctttaaaataatccaaattcatgctcgcatctgagggcgcgtccgggtgccgccaagacgcaacatgatgacctgtacctgctaaaaatacccctaatttgatttgtttctttttgcttgtcatgacgatactccttttatcatgtttttaggctgaataatccgaaaaataaactcctatattcctagtcgtttaatatgaataaatcaaaatgtacctttgtcttggacgtttgtcaatgagttaagattaattttttctattcaagcgaaaagacccttgcgtgaccatgagggaacggcattgattcattcaactagtgcaacctctatatcggcaagaaaactgagtctaatgaagcaaagactcagttttcacccaagaattttatataagatttcgccatttcctttgccttttcttcgcttttgcaaaccgcctatccattcagacgccgtaacgattgtataaaaaaacagctgactccagatattcaaacgggaatcagctgattgatgtgaattaattaagctcatgaatactttcttctgctttagcagaaaactctttaggctcaaggcggtctaggtcttcatgaaataaactcactttttggatttgccgattgtcatagtggtggaaatagtagtttccagtttcgttgcacatcacggaagtatattgcgtataatgaatttcgtcttcttccgttatcactgcgccctttggtatcgtcatatttgccaaaatttgaaaagcggctgttacacctttcgtttcatcggccgccggctctagatgttctttcaaataaacagctctgacaaaccgggaaggcggtgtataatcccccggcagaccaacagttcctaagccttggccaaaagcagaaagggctaatccgcccatctctttgctctctaattgcttcggtctgattcctgtatattgctgcagattggttacatgccatataaagtcggggctgttcgtcatgacaccaggttgattatcatagactttgaggccgtctgctcttggttctatcgtcaggcttcggcccgtccggtctgacaatatccagtgaagcggtaaaactgtatccaatagatctaattttttctctacaatcgttaaagatcgaatcttttcttttacgtcttccaaagactgacagactgacagcacccatgtcacaaactcatgcgggacaatgtgaacggtatcttcccgtatcgttttttcgtactccgcatagcccggaaaataaagcgccgcacaagataaaccgctttcattaacgccgtcggcaaataatatatttccaagttttctccccataccgataaacgcgtactgtgtctgatgggcctttccgtcagcttcactcttccagctgtaacggcgcggatagagaatgacctccgtccccagctgaaatgcaaaatccattgttctcgctaataaatgattccggtcagcagtttccaatgtaagacttgtgcacatttgatcagtccccttttcaattcagattaatatcatacatattgtgaacgaattggttttatcagcataacgaaagtcaaatcgattcgtcaaagaattgacattacatcaaataaaacgaaaaaatccagccttctaagaggctggattttttattatttagccaaaacaagctcgtgaatcgcatgtgcaacgccatgttcattattggagcgcgtttgaaagtttgcggcttccaatacttctgggatggcgtttgccatggcaaccccgcagcccgcccattcgatcattgtcaggtcgttcccgttgtcgcctatgcacatgacttccgcctgttcaattccaagcagctgtgccagctggcgtacagcatttcctttgctggcttccgagtgcagaatttcataaaagaaaggcgcacttctgaccattgtatatttttctctcacttctttcggaatcgatgtaatgacgcggcttaagttctccggtttatcaataaacatcactttcgggatgaggatatcttttggcacctcgtcaattttgcggaaatgaagcggcacctgtgtcacataggattcgtatacggtaaattcgctaatgtcccggttaggcgtatacaaattagatgagtcaaagaaatgcatcggcgtcttcagctctaagctcaggtcatataatgaagccaaatcatcataaccgagagacagctctgagaccacttcatttgtatgcgtattttgaacaagtgctccattatacgcaataacatagtcgccttcttcaattaaattcagttcatctaaatatctctgcacacccccgataggccggccggtgcaaagcacaattttgacaccttccgcttttgccgcgtgaagggcgtcgcggacctcctctgttacttcatgatgatcatttaaaagtgttccatccatatcaattgcaattagtttgtacatcctgcatctccttcatgtcgttttcaggctatagtcccatcatatcgttttttctttttgatattcaaccggaagagatggttttctccggattctgtttagacgccgcccttgtcttcggatacgcaagcgcggtttccgctttctttctgccttgacgccgttttctgcttttttctgtttcatcagcagaaagccggcagctagaaaaggaatgccggttatattcaagatggcaagcttcacacccgccgcgatgaaaaagaacccccatgaagatgatggattccgtctgatcatgacgtaagccgccatttccagaacgatcaggatggcatgaagcactatgccataaatcagcaatacaagggcaaaaaacaaaacataattcacgattgcccctgagtacatcatagcgcgcatcatttgtataaacgataaggactgcatggagccgctgatgacattagggttatagatcgtatagtcactaaataaatgtttgactttgagaaaagcccataatataaatatccattgaatgatatgtaaaacaagccccgctgccaccagtctttcagctttttgatttctcatctttctcctccctgccggtctttgattcgattcttgtcatcgtttttctctgtccattttgctcccatatcaatgtcccgttttctcctcttttcagcgtgcttttgagcggataataggggccgaggtactgaatctcgatagacccgtcagtgctttgggaaatcaccttgtatgccataaaaggcagctgtacctctcctcttccttcaatcacttccgtttccacaacctcgtcttcggtaaatgtgactgttgctgatttcacaccgtccgttggcccgggggcacgcccctcatcccacgttccgtaataaaacggcgtctcttctttttgctgctggcagcccgataccatgatgcatacagcaattaaaaacaaaatgccatatttgtttctcaaggggatcaccattctttcctccttttttgggcgaatgccgtgccactgtgccaatgactacataagttataaggaattcacccacaaggagactgatcacatgaacccttatcaatattacagccctcagctgcctcagcaggaaccttactatagccactatgagtacaatccttatccgcagcaggatgtatacgatccataccaaatggacagacagccggcattggaaagaagaatcgcagcacttgaacggcaaaatgaacagcagtcaagagaattaacccgtctgacaaacgaagaccgccgtcaaaatcgggaaattgcacggattgccgaacaggtcaatcagttaagccaggctgttgaacgccatacacgccgcctaaatcggctcaatcagcgcctccgtacagtagaaaaccggctgaatatcccatttactgcaggggaaggcggtttctgagcgaaacaaagaaaaaaagcggaatacgattctcccatctcagggtttcgttttccgcatttcttatatgttaaaacggaacatttacataaaaagggtttgtacccagtatacaatctttaccgttttcattcaaagatagaggggctgaggaaaataattgtagttcctctttgacggaatttcttttcattcaagttgcatgataataccgactcacgtcaatcgatacatggagggatcattcatgcataatacacaacacggcttgcagcagctgaaccaatgccgccaaactgctcagcagctcattcagcaaacacagcaaagcagccagcaatatcgccaaatgcttcatcaggaacagcaaaacatccaaatgctgcagcagattctaaaccacgaacaacaagctgcacataccattcagcaagcactgcacgggcatgatatggcgattcaaaagtgccagcaggttgtcaacatgtgcaaccaaatgcaacaggaacttactggacaatccagcgtcatgaatacgaatgtgtctacacttccattcggccaaaacacgccatttcagcagcaatcctatcagcagtaacatataaaaagctcaacacaatgcgagtgttgagctttttttcttactgttctttgcgaatatgtatatcctgaatagactgtttcggtgcatgaaatctgctctcggcttcacttcttgcctcggcaaaagcccgcgcctccacatgatctttgtagacatccagctgaatcaaatacagcgggcgcactttaaatccatgaataatggtcaccgcccataacgggaccacaataaaaacaccgggcagatcgggcaaaacaaaaccaaacgcaaaaatgaaaaaataaatgatgccgtacatgatccactttctatttctaaccttgatgccaataaataaaaaggcaaaaaaactggtaatggcaaaaggcatgaaaataaacagcatccaccagctatgcagccattcccaagcggaacctctttttgtaattcccatatttttctcctcctatttacctataataatcgattaggcataccgcgtcacccataaacgggaaaaactttctcccttaaaaatagtgatagacggggaacaggtttcttgctatattattaattgataatgataatcattactaatctattgagatacatagtgggagggttcttgatgaaaaagaacatattgctcgtgggcatgcttgtgctgcttctcatgtttgtcagcgcttgcagcggcacggcttctaaagggagctcaagcgattctgcttccgaaaaaacagaagtgagaacatacaaatcaccaaaagggaacgtcaacattcctgcacatccgaaacgcatcgtcactgatttttatgccggtgaattgctgtctgtcggggccaatgtggtcggctcaggctcatggtcatttgataatccgtttttaaaatcaaagctgaaaaatgtgaaggatgttggtgatccaataagcgttgaaaaagtgatggagcttcagcctgacttaattgttgtcatgaatgaagagaatgttgataaattaaagaaaatcgctccgactgttgtcataccttataacacagcgaaaaacgtagaagatacagtcagcatgttcggagatatcgccggatcgaaagacaaagcaaaatcctttatggctgactttaacaaaaaagcggaagcagctaaaaagaaaattgccggcgtcattgacaaagatgcgaccttcggcatttatgaaaacacagacaagggcgaattctgggtgttcaatgacaatggcggacgcggcggccaagctgtatacaatgcacttgggttaaaagcgcctgaaaaaattgagcaagatgtcatcaaaaatggagagatgaaacagctctctcaagaggttattcctgagtatgccgcagattatatgttcattacggattacaacccgaaaggcgaaagcaaaacactcgacaagctggagaattcctctatttggaaaaaccttgatgctgttaaacataatcgcgtgtttatcaatgactttgacacgttctacccgtacgacccgatttctgtcagcaaacaggtggatatcatcaccgacatgctgatcaaacgggccgaagaaaataaaaaataaaaaaacggcacagtcatgacgctgtgccgttttttatgattcactttaattttgattgtacggagtccggcatatcttcaaacttgacttcttcccaagtctcgacatactttcctttcgccttcaccttcaaatacgcgttcttccgaagctctttgccggcgaaaaaggtcacttcttctttttttccggatgcattatatccgtctaatgtatattcagtaccgcccggactaagatgtctgccatctcgatcaatctgaacatagacatcttgctggtgaataaacggattaaatctgtctgtaacatcgttatgaaaaaagagaagcccgcatattacggcagcagccgccaagacggccaggattgccattgcttttttcatctttgcactccccttacttgttcatttttttcaaatagcttgaccgcaccgcgaggaagaatagaagctgaaaaatgaaaaaccctccgatggtgagactgagcggccccgcgacatcagaatagccttccacagccaatgttctcaaggcaaacagtgtatgcatgacggcaatgacaaatggaaagaagaaaagaatggccaattgtattgtcacgctttgtgccatttctcgctcactcagaccgattttggccagtgaacggtagcgctcccggtcttcatctaaatcagtgaacagcctgaaatataagaaacttgctgccgcgacaaagaatacaattgcgataaacaggccgataaataaactcaggctcggcagctgcaccgtatcatagtaagtcccggcttttgaagcaaaatcagaatgcacgtcgatataattgccgtaaatctcattttgcaaggattggctgatctcaagactgtctttccaatgatcatagctgtagccgtataatgacgcttgatcaccgagtgatttcagctgatcaaaggtttgatcattcaccgcgatgatagcattcaatgagatcagcggttttttgacttcttttaccgacagtttttgatcagacagctcccctttttggttcagcagcttcagctgatccggcgcttcgtttttgaaattgcggtcatacgttcccgggaaatagacagcctcgtcttctttcaggccgttcactttgacatggaagtattttgccgcatccgattcactgatcatgtaaacagggggaacagtttctccttcctgatagcgaacataggaaacatctattttgtctttcttatacgtaaagccgtgtgttttcagttcatggtcaatatctttcaaatgagtctgttcttttggattgttgctgtaagataaatactccatttcataagcggactcttccgctccgacggtcgatttgtacattgcgagcacgcctgtcgcagtaaacgcaaccgcggaaataatgctgacaataaagaacaggcgggcgttgtcttttagacgatagacaaggtcagaaacccaaatgatgtttttcccgcgcagataaaaggttttccacttcttcagcgcgcgcagaatccatatgctgctttggctgaaaaagaaatatgttccgataacggtgagcagtaaaatgataaacggttcggccccgtggacattgcctttaagaaccatgccgtacccgccgcacagacaggcgatgccgaataaggacagaagcacggacggcttaggctccggtttaaccttgccagtgccctttattaatttgataaccgtatttgatctgacaaaaaggatcgtaaactgcgataaaaagaaaaataagagcagaaatccgcaggccgtaataccgagcgctttccaaggcatatacaaaggcagcgcgtccatttctaaaatataagcgccgaccgtaaagaacgtctttgaaaaaatgaatccaccgattatgccggctgcaattgacatgacgccgatgatcatattttccgcagtaatgagctttctcagctgccccggcgtgatgccctgcatgagcagaatgccgaattctttatttctcgatttcaaaaatgcattaaccgaatacagaacaaataagaaagaaaaaacaaagatcatccattccgcggcggttaagccttttttggcgatgttattcaggtagccttcctttaatgccggatgaaacaggaacatcgcaaaggtaaagaaaatcaaaacggaaaaggcgctgcttaaaaagaatgcaagataagcccttttgtttctcgtgacgtttttataagcgaactgaagaaaggtcatttgcgtttccccccagcatagacagcacatcaagaatttgttcataaaagacttggcggttttccccgcggtaaatctcattaaacaattcgccgtcttttataaagatgacgcggcggcagtagcttgccgaaaccggatcgtgggtcaccatcaaagccgtgacatgatcatcccgattcaggctctgcaacgtttccatgacgtcttttgtcgctttggaatcaaggtttccagttggttcatcggccagaatgagtgacggcttatgaatgaccgctcttgcgatggcggcccgctggcgctggcctccggatacttcaaacgtccgcttgttaagcaggttttcgataccgagctttgccgcgatgccgtgcagtttttcttccatgacagacggcgcttctttttcaagcgttaacggcagcatgatattttcaccgatcgtcagcgtgtctagaaggttgaaatcctgaaacacaaatccgagctgcttgcggcggaaatgagcgagctttgtccgcttcaggcgatgcgggttttctccgttaatcaggatatcgcctgaatctggacggtcaatcgttgaaatgatattcaaaagcgttgtttttccggacccggacggccccatcaccgccgtgaactcgccttcttctattgaaaatgaaatttgctttaaggcctgataggacacttgtcctttataggttttatttatatgtttgacttcaagcatattcgccatgaaaatcctccttatggttttattcttgttgatctgggctgctttcatgtagtgccgggacgttcaacataaaaatccccttgacataaatccatgttatcaaggggaaacaaagcgggctatgttgttttcttaacgcagccttacatttttgtaagaaatgaaaatcgaactgatgtcccttcaccgggagacgagctgatgtccaccgtatgattgagcttatctgtaatttctttgacgagatggaggccgattcccgtagattcttggaaacgccgcccgttttcacccgtgtaataagggtcaaacacccgcttgatgtcttgtgagggaatcccgacaccgtaatctttgacttcaagcaccgtcctgtcttcatcgcggaagacattcagctcaagtctgtcactcttgcccgctgaatacttgaccgcatttgtgaccacttggccgatcgcaaatttgagccatttggcatcggtgtaaatctgatgatcatcgcaaacgttcattttcggataaacgcgatattgaataaaaaatcgtttatagctttgaatgactgattggagaagctcggacagggaaaccgcttcgattttaaaatcccgttcaaacaggtcgagccttgaagaataaagaagcgtctccagcccgaattcaatctgccggacttcttttttgatttgttcaaaaacgggctcatcctcttcttgaatgattaaattaatgaccgacagcggcgtcttcacttggtgcacccattgattcatatacgtcacccgcgcgtcaagcttggcttcggtctcatggagcttctggtgctgcagccggatcagctccatctgcttttcatacagctctgaacagaacactgaagaaccgagatacgggatatccgtcccttcctgccccgagctgagccaatgatacacgccgcggtctttgtaccagcgataggcaagatagcccgccaaaataagaagctgcacgcccaatatgtaaaacaagtgagaaaaagaatgcagacccgcaaaccagtaataaaagaagacaaacagcccttgaaggagaaaaagcagaatcagcactgcatgagaccggagaaacagcttcatgactgcgccctcagctggtagccttcgccccgcaccgcttcaatagaaacaggcgcattcagctcccgcagtttttttctgagccgcgtgatatacacgttaagtgtattatcatcgatgaatatgtcggtgtcccacgtcttttccatgagacggtcccgactcgtcaccttttctccccgctcaagcagcacttccaaaagcttgctttcttttttagaaagctcgcttttttcatcctgaaaacgcagttcaaaccgttccacaaagagctgaacgccggcatattcaaccactttctctccctgctttgcggcgtactccccgtacgccctccggatctggcttttgattttcgcaagcacaatatcataagaaaacggtttttcgatataatcgtctcccccattttcaatcgccatcacctgatccatttccccgcttctggcagaaataaagatgatcgggcttgtggagtgctggcggatctgccggcaccaataatatccgtcatatgccggcaaattgatatcaagcagcaccacatcgggcttttcccgcaaaaagacatcaagaacagctgtaaaatccgcggcgaccactgtttgatatccgtatttttcaaggtaattctgcaatagtccgcgaatgtcttcactgtcttccacaatcataattttattcaaactgaaccactcccgtttcttacactgctgccatcatcataatcgttttgggcgtatggacgcaacaccgcacaaaaaaaccgccatctcggcggtttctgatctctttagccgacctgctgcttagctgctttaccggctgatccgaactctctcattttgcttcgcactgtctcttccacggcttcaatgccgggtgtcaaatagccgcgcggttcgtacagatcgctgttttcctgaaacatgcggcgtgtttcgtctgtccacgctaccatacattccgtattgatattgatcttcgcgtggccgagtgtgatggcttttttgatctgatcctgcggaatcccggatgccccatgaagaacgaggggaatatcagtcatgcgagagatagcctccatttccttaaatccgagattcggctcaccctgatatttgccgtgtacagagccgagggcggcggccagcgcgtcgatattggtttctttgacgatccgctcacattccgcgatatcggcatagcggaccccgccgaccaggccgtcttccattccaccgaccgtgccgacttcggcttctactgacacgccgtgttttgcggcataatcggtgacttcttttgtcatcgcgatattctcgtcaatcggctgatgggagccgtcaatcatcactgagctgaatccggcatcaatggcctgtctacagcgttccgcactgctgccgtgatcgagatgaagcacgaccggaacggtaatcgccatgtcctccattaacgcgccgaccatggcggcaatcgttttaaatccgcctaaatagtcgaccaggcgatcggaagccgcggcgatgaccggtgattgctccttttgcgccgcctgcaaaatcgccttcgtccactgcaggccgttgatattaaactggccgatcgcatactgctcccgctttgcatcttcaagaagctctttcatcgatacaaaagccatgtccacccctcctttatccattacatgttgaagtattttgatacgacgtccactgttgtttttttcgctgtttgaatggcttcctcagcagtcagcttatagtattcaggccggaatagctcaaccgatacaacatcagagaagccgatttccttcagtgctgataagtgggcatctaagtcaattgccccttgtcccggccatacacgatcctcatctgttaaaaagccgattgggaaatcttctgtatcatcgatatgatagatgaagattttctttccgtccgcctgctttaagctctcaatatttgaacccattgcatggaagtgaaaactatcaaggacaagcccgacattgtcacggttaactgtgtttacgatctcatacgcctgttcaaacgtattgaccgtacattgcggatggccgacaaattcaagcgcgatttttacgccgtacggctccgcgatatctgacagctcagtcagcacctctacactgctctttttgatctcttcttttacaatcttctgctctgtcacaagcggaacggccaccacatatttcacaccgagggttttgcatgtttccatcatgcctttaaattcagtgatgatctcgttgtggcccttttcatcacggttgttgaagaaaacaagcgcgtttagggcaagcggtttgatgtgatgggtttgaaaatattccgcaagatctgccaatgaatgatcttttaagtactcgggcagcttatccattgtgcggatttcaatataatcatagccgtgcttttcgcatagttctaaatcctgtttaaggtttgagttttccaatgttgtcgcttcattaaaacaaagtttcatgccagactcccccatctgcgttttagatatgaagggagttcggcaggaaggctgtcgccatatcccgccgaactccatgctcagcttatgccagacctaattcttctttcattttcttaagcataaatcggcttgattcatccgctctttcatcgacccaagcaaatacggcattcgtcgcaattccgtcgaacttcatctctctcagttttctgaaaatcgtatcaaaatcaacctcgccttggccaatgtccaaatgctggtgaaccgttactttcgcgtcaggcggattgacgatgtagcgaaggccatgagccgctttatgattataggtatctgcaaataaaacatgtgtgaggcggtcgccggcttcgtcaaacatggtctcgatgtcgcctttgccgtcatcatagaagaacgtatgcgcagtcgagtagacaagattgatccaatccttgtcaagcgcgcggatcatatccatcgcacctttgtgcgtttcgataaaatcgtatgggtgggcttgaagattaagtttaataccttctttttcaaagactggcagaagctcatccatggatttgataaatttttcttcacttgttaaaggatcatattttgaaccgctgaattcgctgttcatcaaatccacttcaagttcaaccgcaatttcgattgcccgtttccaattgcgcaccgctgcctgccggcggtcttcatcaggacccgcccagtggtaaagaggaagaagcgatgaaagcttaacacctgtatctcttaaaaggcgctttaattgtttgatctttgctgaatcaactttcggatatttataaaacggacaaaaatcctcacgcggagacaattcgatatattcatagccaagctccgccgttttatagaccgtttcctctaaagttaaatcatcacgatacatggatggatccaatgctaacttcatattttcactcctctgttttttagttttgaactgttgtaaaagattgatagaattccggtttttccttcaattcaaccttttctttttgtccagattcctgggcttttacacacgcgtcagtcgtgacagcagcaatatagccgtcccatgccgtcggtccgctgacctcgcctttcttttgaatcgaatcaataaagtcttggatttccacatcatacgcagcgacaaagcgtctctgccaatccatcaaaatatcagtactgaatctgccttcttttctcaagctgatgcttgatggctcgggaagcttgatgatgccgtcttctccgacgatttcgcattgaatgtcatagccgtatttacagttcacatagatttcagcattgatgacgataccgccttttgtttcaattacgacgatttgcggatcttttaaatgcggcagcgcgtttttcgattttttcgggtagatgacttgaacggactcgtagtcatcgttgacgagccagtgcagcacatcaatttcatgaacaagcgtgtcgactacggccatatcggttgtgtagttatctcctacagtcgggttgcggtgcgcgcagtgaatcataagcggttcgccaatcacatggttatcgagtgcttccttcagctgtacgtaaccgctatcataacggcgcatgaagccgacttgaacaaggcgtttgcccactttgatttcttcttcgacgattcgcatgcatccttcagccgttgtcgcgagcggtttttcacagaacacatatttctgggctttaatggctttcagcacgcttgactcatgcgcaggcccccagcttgtcactaaaacagcgtctacattttcgtctgcaagcaagctgtcatcattcggataaaccgtcgcgtttaattggtattgctcaacgaccttttgtgcagcttcttgattaacatccgttacagctacaatttccgcgccggacagcttgttcgtgatgcggttaatatgttcttttccgattgctccagttccaattacgccaatacgtaaactcattgacagccactccttctgttgattacataattttgctttctgtttcttgctttacttggctctgaggagatccgtagagttcctcttgaatttgttcaagcgacttgccagacgtattcggcgcaaagagcagcccgatgatcatactggccgtcacacatccgagaagaattgcagccatcgttccaatgccgaaattggtgataatcattgggacaaacagactccaaatccctattgaaatacggacaaggaaaaacatcagcccttgtgcggaagcacgatattgcgtaggaaagatttcactggcccataactgatagttcgcttgctgccctgctccgttattgatgccgatcacgacaataaacaggagcagaatcggcaggccttcaattggcagcagaaacagtgtccacccgatcaccgccatgaaagcggcgattccaaatacggtttttctatatttgtcggcaaagggcatgaagatcaaggcgacccccaatcctgtgaagataaacagccccatttgcaaaaggttggccatgttggcagatacaccgccgacctgctgataaatgtatggcataaagaagcccatgaccccggcagctaagttccaaaccaagtacacacccatcaaaaacaatatgctttttagatacataggcttgagcaaatcaaaatacgatgtcttattcagtacagccggcttctctgcctgagcatcctccggctgattttttgtctgccaggcgtctgattccggaagcctgattctcaggatgtacgtaatcagcgcaatcacaagcagatgggcaaatacgattttattccccaagagtcccaagtcaccggccagtacggagagaagcagtacaacgacagcgcccgcggcccaagcgacttgtgctacgccgcaatgcctggcccgattcttctttggcgcattttccgcaataatggtccatgacgcggttatatcagctcctactgataaaccgataatgatgtaaccgcttaacaacatggggaaattaaccccgaacaaaaccaaacaaatccctagtgcataaaccagcatactattggtataaacagccttccgtccgactttatcagccagaaacccgccaagcagcgcgccgacagcggcagaaatcgcattcgcgctcagcgcgccgagcagcccgatttgcgtatcggatagcttaaggtaactgacccataatgataaaccggcggagcctgccacaattgaaccggcatcaatatagttggccaatgctgccgcgattgtccgtttattgaaggctgaatctccattggtattgcccatatgttcattccccattaagccagatccaacaactgctgatcaatatagtttctcgcaatcaatgcatactccagcgggtttgcaacatcggggtcctgttcagcttcaatgacaatccatccggaataactgtgcttcaacagcagctgatatacttctctaaagtcaatgcagccgtcaccgggaaccgtaaacatgccttttaaaaatgattgccggaacgattgtccttcgagcctgcattgttccatgacattcaggcgggcatccttaaagtgcacatgcttaatgcggccgatatgcttctcaagcatccccatgtaatcgccgtcagaaatatacgcatggcctgtatcatagaggaggtgtacatgcgcagggtctgttcctgccatcaggcggtccacttcttccgctgtttggacaccagtgccgagatgatgatgatagacaagcttcaagccatgctgagcggcaatttcgccaaggtgattcagcccttcgcaaagccgctcccattcatcatccgtaaagtgcggcttctctgtgaacacatttttctccaagccttgcacgctgtacgtttgttcagagacaactgcgacatccgcgtttacttgctgcaaatactcacaatgcagggtaaatgtctttgccgcttcaccaagtccgtcacgcaaaataaaactgctgaaccattttcctgcaatgcgtaagttccgaagcttcagctctttgttcaggacggcaggttcggggaaaaagcccccgacttccgtgccttgaaaacgtgcgacaacgatatcacttaacaaatgctgaagtgtatttcccgctccaatttcaggcatgtcatcattccgccacccaatgggagcgattccccacaggatttcatttttgcccatcttggtgcctcccctctaatactgcttcgcagattccagctttttctcttttgcttcgtatgccttctgaacgctttcttgttcagatacctctgccaccccgacatgccaccagctgtcatagccgtccgtcattgttttaggcagaaccttcatttcaattaatgttgatacatcctgtttcttcgcatcctctaacgccgcttttaattcttctactgtgtttgcacggtaggttttcgcgccgtatccctcagcgactttcgcgtaatcgacattcaggatttggttgtcatctgtgcggaactcgcaatagtagctgccgctgccgtgatccatttgcaggttgttgatgcatccgaatcctgagttgtcaaagagcagcacattgattttcttgttgtattgaatcgccgtgatcaattcagaatgaagcatcaggaagctgccgtctccgacgattgaatacacttctctgtcagggtgggccagtttaagaccgagtgtcccggacacttcatagcccatgcaagaatacccatactccaggtgatacgtattcggaacattagaatgccacagacgctgcaaatctcctgggagtgagcccgctgaacagatgatgacgctgtcttcaggaatcgtctcgttgattgtcagcaatgccgttgtttgcggaagctccgtattcaacgcgtcagcatattcattcaggacctcttgagaaaaatgatttttgatttccggatcaaatgcttcccgcttaaacgtcactttgctgagacgctcgcgttcagctagccattcgtccttcagctcccgaatcgttgtgccgaactcgctctcatagccttcaagcaagccatgcagtttgccaagcgtcgctttcgcatccgctaccacttggaatgcatcaagtttatacgcctgcattcggctgacgttaatgttcaaaaacttcgctttatcaaaatcaaaagcggtcttagaggatgtcgcaaaatctgtataccttgtgccgatgccgataatcaaatcagcttggcgggccgctttgtttgccgcaagtgtacctgtgatgcccattccgccaaggttgttcgcaaaatctgcctcaacagtagactttcctgcctgcgtttcaactaacggaatgttataggcttcagaaatggcaaccaattcatcgcgcgcaccggaatattttgcgcctccgccgacgagaatcacaggttttttgctggatttaatcagctccgccgcaccttgaagctcgcgctcgctcggctgcatgcgatcaatatagtgaacccgtttgacgaagaaactttcatcaaaatcgtatgcttccccttcaacatcctgagaaatacaaatcgttgccggacctgcttttgccggatcagtcatgacttcaaacgcgcgcagcaaactgctcatcagctgctcagggcgcgtaatgcggtcccagtatctcgatacaggcttcaatgcatcgtttgtcgtaatcgccgcactgtattcttgctccatttgctgcagtacagggtctggctgtcttgtcgcaaatgtgtctgccggaatcaagagaactgggatattgtttgccaatgcagtgccggctgccgccaccaagttagccgctccaggtccgacggatgtagacaccgcatatatttttcttctcagcatttgcttgctgtacgccatggccgcatgcgccattccttgttcatttttcccttgatagactttcaaatggcctgcatcctgctcaagcgcctgcccgatccctaatacgtttccatgaccgaaaatcgtgaagatcccttcgacaaaaggctcttcctttccatctacatggatgtactgctggtttaagaatttaatcagcgcctgtgctgttgttaagcgaattttcttgcccacaaacgatcccacctttactcgatctttttcaattatgactgtgcttcaataagctgtacgatttcatcagcagtcggcatcgcttctgacgaactgtgcttgctcaccacaatggaagctgaagcactgccgtatttcaatgccgtttcgatgtcttttccggtgacaaggccatagataaaggctgacgcataggagtcaccggctccaaaagttttcagcacttttgtcttgtacgcttgagcgcggaatacctcgccggatttgctgtatgcgtaagagccttcgacgccgtgtttgatgacaacgaggtcggctgaatggccaaataaatgattgacggattcttcattgcttccgcctgtgcggttttccatcacatcaaattcatcgcgtgtgccgatgacgatatcagactgctcggcaaccaaagaataataaacggctgtttcatctgatgactgccacgtatacgggcggtaatccagttcgaacaccactttaacctgatgcttcttcgcgtattgaacagcttttaataccgcttcccgtgacgggcttttggcgagcgctgtcccggaaacaagcagcattttcgcatttgcgatatagtcttcgcttacctctgaaggctcaagataaagatccgccacatcatcgcgatacattaaaatgctgcattcttcagggctgaggatttctgtaaatgcaaggcctgctttgtgtccatcttgatcaacaaccatctgtgttgtatcaacgccggtctttctcatataggactctatgaatcttccatgctggtcatccggaattttgccgatgaagcccgcttttaagccaagcttcgcgctgccgatcgcgatattcgcaggtgaaccgccgacatatttcgaaaatgtcatcgtttcttccattgggcggttgtattcgactgcgttcagatcaatacatgcccggccgatggcaacaatatcaaaagccttctcttcattgaatgtatacttcatcgtaaacagccactcctcacttgttagcgttctaaaatccattcatgcgccgggtcgttataaaacttccattttcgcgtcggccctgccatgacatttaaatagtaggatgtgtatccgtccggaacgcctaccgggtggtatcccgcaggaacgatgacaacgttttcatttcccacagtcattgtctcgtcaatagaacggtcatctgtgtatacgcgctgaaacacaaagccctgtcccgggtctaactcatggtagtacgtttcttctaagaaagattcttccggcaagttgtcttgatcatgtttgtgaggcgggtagctggaccagttgccgctgtctgtatagacttcaactactaatagactgttagctgaagggtctgaatccggaagaatgttatgaacagtacgtttgtttgaaaattgcccgcgatgctcaattccgttgtcttccgctttgatcagctttgtcggaagctgcttttccgatggagaatagcaaagcgccactcttgcgtcgctgactgctgtgatctcaaatgcacggtcatttgatatatagacgctgtctgtcggttttcgttcaaatacgctttcacgcgtgccgatattctcaaaagtcgactcatgatctgtcactgtaatttttcccgttaccgccacaatacagatttcttgttttttcaattcttctgtatagcttgaacctgatgcaagatctaacactttaaactctacataagtgagatcagagttggatgtcgttacttcgtgcacgagtttgaccccattagacacttcatgcgactgcggcttacgcaacaaataactcatagagaagccctcctctttctattggcagaatgagtccgaacagcgcacatggacgccgttcggctgttcgtcgtttagttgaaatcaggtgccggatatcttgccgtcaccacttttttacgtgtatagaagtcgacgctgtcttttccgttcgcatgcagcgttccaaagaatgaagatttccagcctgagaatgggaagaacgccattggagccggcacaccaaggttgatgcctagcattcccgcatcaatgttttcacggaagtagcggattgcgtttgagttggatgtgaacaagcaggcgccgttcgcaaactcagacttattggcgatttcaatcgcttctttcaggtttttcacacggatgacagataagaccggagcgaaaatttcatctttccagatcgtcatttctgttgtgacattgtcaaagatcgtcgggccgacaaagtagccgtcgtcagacacattttcacgtccgtcacatacgagtctggcaccttcttcaagacctttttcgatatagctgagcgtgcgcttcttgttgtcttcgcgaatcaccggtcctaagaacacgccgtcatcaaggccgttaccgattttaatgtccgccactttttcctgcagcttcgccataaattcatcggcgattccttcttcaactgtcacaaccgcacaagccatgcagcgttcaccggcagaaccgaaggcagctccaacgatgtttgtaaccgtgtcttcaagattcgcatcgttcaagacaatcgtatggtttttcgcgccagtcagagattgaacgcgttttaagttttcgcttccttttttgtagacgtattcgcctactggcttggagcctacaaatgaaatcgctttaatttcgggatgctcgaggatgccgttcacaacgtcatgcgcaccgtatacgacgttgaacacccctttcggaaggcccgctttttcaaaaagctcaaccaatttctctgttaacagcggagtccgctcagatggctttaaaataaatgtgttgccgagcgcgatcgccatcgggaacatccagcaaggaaccatcatcgggaagttgaatggcgcgattccgccgacaactccgattgggtaacggtagttcgccgcttcaacgtccgttgcgatggaagcaagtgagtcacccatcatcagggaaggtgctccagcggcgaactctacgttttcaatcccgcgtcccacttcacctaaagcttctttcgtgttttttccgttttcaatggtaattagatgagcaagttcttctttatgctgagacagcagctgctggaagttaaatagaattctggcgcggcgaggaaccgccacctttgaccatgttttaaatgcttcagccgctgtttgcgctgcgtaatcaatatcctcttttgtagaaatcggcacttggcatagcacttctttcgtcgccggattgacgacatcttcatattgatctgttttgctttcaacccattcaccgttgatgtagttttttaattttctgatttctgccattcttattgcctccttcattagtaaacacatacacttgtatggatggttccggatagattcatatcaatatccacttttcagcaagccaagaattaaacgctttcaaaaacaccaaaaaaataaatggcggatgcatatttacatacaagcaaccatttcatgcacaacaggttactttttggtcatttcttggttatattctaatcgcataatacccataagtcaatcataaacactacattttttcattatttttattatattaatcttttaatcaagtaagagaagtaagagaaggccgtccaatcttgcaaaagatatacaccgatgttatcattttttaagcaactattgattaacttttggtttttattatatatttatgttacgtaaagattcaagaaggagttttttatatgaaactgatgcggattcaggaaatggaggagtacattttatcgcatggcactgtttccttagatgagctgtgccaggtgttcaatgtctccaaaaacacagtcagacgtgatatcaacaagctaacagaaaagggtgcgattgaaaaagtatacggcggcgtaacatctattgaaaaaaccgcattagttccttttgaaaatcgcaccattcagcaccaggatgaaaaaacaaaaatcgcccattatgcttcccgatttattgaagatcacgatttggtcttcattgattcaggaacgacgacaaagtctattcttgatacgcttgatccagccaaaaatgtcaccatcttaaccaacagtttagacattatcaatgcggcgtcagctttgaagaatatcaacttaatcattatcggaaacaactataagagaaaaacccgctcctttgtcggcatggacgacccggctatgcttgataagtacaatatcaacaaagcctttatgtccgctaccggaacgacgctgactcacggattgaccaattcggatctgctggagtatgaaattaaaaagaggatttcagaaaaagcaaaagaagtgtatctattggctgaccattctaaattcggaaaatcaacgcttctgacgtatgcaccgtttgacaggctgcattgcattgtgacctctcagccattagacgacgagtacacgcagtactgcaatgagcatcaaatcggcattcatctggcctaacgtttacaatagtgttgagagtctatcatccattttattctaggaggcagatcatgaaaaaagcgaagctcggaaaatcagacttgcaggtattccctatcggattaggaacaaatgctgtcggaggacataacctctacccgaacctaaatgaagaaaccggaaaagaattggtgcgcgaggcgatccgtaatggcgtgacaatgttagacaccgcttatatttacgggatcggccgttccgaagaattaattggtgaagtgctgcgtgaattcaaccgtgaagatgttgtcatcgctacaaaagccgctcacagaaaacaaggcaatgactttgtctttgataattcaccagaatttcttaaaaaatcagttgatgaaagcctgaagcgcttgaataccgattatatcgatttgttctacattcacttccctgacgaacatacgcctaaggatgaagccgttaacgcgctgaatgagatgaagaaagccggaaaaatccgctccatcggtgtatccaacttctctttagagcaattgaaagaagcaaacaaagacggtttggtagatgtattgcaaggcgaatacaacctgttaaaccgtgaagcggaaaaaacattcttcccgtatacgaaggagcataatatttcatttatcccttacttcccgctcgtatcaggtttattggcaggaaagtatacagaagatacaacgttcccagaaggcgacctgcgaaacgaacaggaacacttcaagggcgagcgtttcaaagaaaatatcagaaaggtcaacaagcttgcgccgattgccgaaaaacacaacgtggatatccctcacatcgtattggcctggtatttagcaagaccggaaattgatattttaatcccgggagcaaaacgtgccgatcagctgattgataacatcaaaacagccgacgtgacgctttctcaagaggatatttcatttattgataagctgttcgcataagaagaaaacagccttctccattggagaaggctgtttttttgtgcgataaattcctaaataactgattttgaagcaaaaccttacaaaatgagccataaatccgataaaataaaggtagtttatctcagaaagaaagtgattgagaaagcaaaagtatgaaacgttcatatcatctagctcatatgaaataaagctgacccagcttcttttatttgctggtcagaatagcggaccatttcgatggtctatggaggaaacagaatgaaacttaaatatgtaaaagccttagttgcagtaaccgttgctttaggtgtactgctgccatcaacgatttctcatgcaaagagctttagcggccgctcatcatctagttacagcagccgaagttcaagctcgtcatacagcggaagctataaatcaagcccgaaatcaagctacagctcaggatcaagctcttctagcaaaaaatccaagacgcctgacgattcatcatcatcgatttcgcttaaaaagaagccttcggaaaaggcaagctcatcaagctctaaaaaatcgtcaggcaccttttccggcgctacatcaaaagtaaccggaaagacatacagcggaaaaacgtctaaagcctatgttggcggacgatatgtttcagtcaatcattactatcacgcaggtttcgcgccatcaggatggtttggatattatagcggatttacaatgggtatgttcatgatcagcatgatgcacccatggggttacacctatcatccagtcggaggcccaggttatgtttcttatggcgcttcacccattgcctggatcgttgatatcatcgctttgattattattttaatcattgtcatcgcactgattcgcgcatttaaagcaccgaagacgtacagaaggagattttaggcaatgagattaatattaaatgagcaagaaattgtagacggaatttgcgtgtatatttccaatgaagaagatatctaccctgaagacgttgaagtaaaggagctatcttataacaagcgtacagggttcttcgctgaagctacatttggcctgcaccacaagcagcttatgtcagatgacatttcagaaggcattattcagttcttagaggaataccacaacttcaatccggacgttaccgtcgttgaattgcaatttgataagaaaaaaggcttctccgccttggttttcgtcaacgaagcagaagaataaaaatgtcttaatcaaaaccttactccgcgcgggtaaggtttttttaatggtttctctgagcataaagttatttcgtttttcctaaactcagcggatctgtgatcatctcttttggctttaacgtttccgtttgttcaaaacaaatgtttcaaatgagataggaaatgggtactaatctattaactttgttatacattttagatactcattggctcaacaactgaggaggagacatttgtgaagaaagacacaaggaaatatatgatctactttttcggcgctttagggggactgctatatggttacgatacaggtgttatctccggagcactcctgtttatcaataacgatattcctttaacgacattgacagaaggattggttgtcagcatgctgctccttggcgcgattttcggttcggccttgagcggcacatgctcagaccgctggggcaggagaaaggttgtatttgtcctttccatcatttttattatcggtgcgctcgcttgcgcattttctcaaacaatcggcatgctgattgcatctagggtgatactcgggttggccgtcggcggttcaacggcacttgtgcccgtgtatctttccgaaatggcaccgacgaaaattcgcgggacactcggcacaatgaacaacttaatgattgtcaccgggattttgctcgcctatatcgttaactacctgttcacaccgtttgaagcgtggcgctggatggtcggtctggctgcagtgcctgccgtgcttctattaatcggcatcgcgttcatgccggaatcgccaagatggctcgtgaagcgcggccgtgaagaagaagcgagacgcatcatgaacatcactcatgatcccaaagacatcgaaatggaattggcagagatgaagcaaggggaagcggagaaaaaagaaacgacactcggcgtgctgaaagccaagtggattcgccctatgcttctgattggcgtcggtcttgccattttccagcaggcggtcggcattaacacggtcatctactacgcgccaaccatttttacgaaggccggtcttggcacatcagcttcggcgctcggcacaatgggaatcggcatcctcaacgtcatcatgtgtatcactgccatgatcttaattgaccgtgtcggccgcaaaaaacttctgatctggggaagtgtcggcatcacactgagccttgctgctttatcaggcgtgctcctaacgctcggactttccgcatcaacagcgtggatgacagtagtctttctaggtgtctatatcgtcttttaccaggcgacatggggtccggtagtgtgggtgctcatgcctgagctcttcccgtccaaagcacgcggagccgcgacagggttcacgactttggtgttatcggcggctaacctgatcgtgtcgcttgtctttccgctgatgctaagcgcgatgggcatcgcatgggtctttatggttttctcagtcatttgtcttctctcatttttcttcgcgttctacatggtgccggaaaccaaagggaaaagcttggaagaaattgaagcaagcctgaaaaaacggtttaaaaagaagaaaagcacccaaaaccaagtgctgaatgagcgtacattataaaaaaaggaatcgtctccttatgggacgattcctttttctgtttacaccatgaccttgcaaatattgttcgtaaattccacagggtcctgaatcggcaggccttcgatgagaagcgcctgattgtacagaaggtttgtgtacaggctcagcttctctttatcttgttcaaacgcgtcctgcagcgtttggaatacctcgtgatttgggttgatttccagcactttttccgccttcacattttggctgtcaggcatcgcgtttaagattttttccatctcaattgtcacttcgccgtcagcagcaaggcagactggatgtgatttaagccgttttgagattctgacgtttttcactttgtctgacagaatgtttttcatttcctcaaacagatccttatacttgctttcctcttcctcggactgcttttgatcctcatccgtgtctatgccaaggtctccgcttgatacggacttgaattctttttcctgataagaagccagcattttaattgcaaactcatcgatgtcctcagtaaagtagaggatttcatagcctttgtccgccaccatttccgtttgcggcagtttctcaatgcggtcgtaagaatcaccggtcgcgtaataaatgaatttctgctcctctggcattctggaaacatactcgtctaagctgaccagttttttctcttttgaagagtagaataataggagatccttcaattgatccttattcgcgccaaaatcattgtacacgccgaatttcagctgtctgccgaacgacttgtagaacgtctcgtatttctcgcggtcttttttcaacaggctttgcagctcgcttttgattttcttgctgatgtttttcgcgatcagcttcagctggcggtcatgctgcagcatttctctggaaatattcagcgatagatcctcagaatcgaccatgcccttcacaaagctgaagtggtccggtagcaggtctgcgcacttattcatgatcagcacgccattggaatacagctccaagcctttctcatattccttggaatagtagtcaaacggcatgttttcagggacgaatagaatcgcgttgtagcgaacggctccatccacactgatatgaacgtgtgtcagcggtttatcaaacccgtaatgcttttcagcatagaatttttcgtaatcctcatctgtcagctcgcttttgttttttctccagatcggcaccatgctgttgaccgtctgctcttcctgcacctcttcaaattcattttcgctgccttccttcggcttattaatggttgtatccattttgatcgggtagcgaatgaagtcggagtacttcttgatgatcgcttttaaacgatattcctctaaaaactcgtcatagctgtcatcttctgtgttctctttgattttcaggataatgtctgtaccgacagaatccttttcacacggctcaatcgtatagccgtctgcacccgcagactcccatttataagcctcttcgctgccaagcgctttactgatgactgtcacgacatcggcaaccataaatgccgcgtaaaaaccgacaccgaactgcccgataatgtcatgtccgtctttcagctcgttttcctttttaaacgcgagggaaccgctttttgcaattgttccaagatgctgttcaagctcatcctttgtcattccgatccccgtatcagagatggttaatgttctcgcatctttgtcagctgcgacctttatgtagtaactgtctttatcaaacgtaagcgcatcgtccgtaagcgctttgtaatagattttgtcaatcgcatcactcgaattggagattaactcgcgcaggaaaatttctttttgggtataaatggagttaatcatcatatccagcaagcgtttagactctgctttaaactcttttttcgccactcttgatcgctcctttaccattatgtaaacccttttcagcatctatttatcacataagatgacaattgtcaatcaggttgatagatgcatatatatgtaaatttaacattagttggatttgttttcactctttttctcactcattctcataaaaaagagaggcttcatcatcctctctttttttctgtgtcattccagcggccaaactcccgcttcatccatatatgcaccgggtagaaaaacaaaccgaacggtatcaaaaacaatagattatgccatgaagcattcagaaatgcgcttgcagtcactggaaacgtaatctcttgcaataaaaaagagatgacagtcagcacaacaaatgcagatggaatggtcacgatgcaataaaacttgagctccttcttatgctgtaccttcaaacttagaaacctcccaacaatttctaattcatcttaacatatgctggcctttcttttctcgcatgtttatcactgcacatagcgggaagacaaatagaaaaaggaggtctcgtatcatgggaagacttgaaaacaaaacagcagtgatcacaggcgccgcgacaggcattgggcaagcgacggcagaggtttttgccaatgaaggcgcgcgtgtgatcatcggagatatcaataaagatcaaatggaagaaacagttgacgcaatcagaaaaaacggaggacaggccgaatcctttcacctcgatgtgtcagatgaaaacagtgtgaaagcatttgctgatcaaatcaaggatgcatgcggaacgattgatattctgtttaataatgccggcgttgatcaggaaggcggaaaggtggacgaatatccggttgacctgtttgaccgcattatcgccgtcgacctgcgcggcacattcctttgcagcaaatatttgattccgctcatgctcgaaaatggaggctccatcatcaacacctcctccatgtcaggccgtgccgcggaccttgaccgctccggctacaacgcagcaaaaggcggcatcaccaacctgacaaaagcgatggcgatcgactacgcacggaacggcatccgcgtcaattccatttcaccgggtacgatcgaaaccccgctgattgacaaattagcaggcaccaaagaacaggaaatgggcgagaaattccgcgaagccaacaaatgggtcacgccgctcggccgcctcggccagccgaaggaaatggcgacagtggccctgttcctcgcgtcagacgacagctcatacgtcacaggagaggacatcaccgcagacggcggcatcatggcatacacatggccagggaaaatgctgattgatgagaaatggaagaaagaaacgaaataagagaggggatgtccctctctttttgtctttcaaagcaatacaaccttatactttttcacatccaaaaactgcaaaaattccctcgccagcacttcaggcggatgcgcctttccttcatccagccgatacaaaagcaacccgataatcattgcggatacataatgggcataaagctttttctctgcgtgaatatcagtttgctgatgcagataaaacgattccagcgctttgaacatatcaggtatcacatgaggaacaccccattcccgattgagaaaatggacaatgggcatatttgacaaagcagaaagcagactggcgagcgccttctccgcttcctttaaggaaaattcattcgggctggaggcaatcgtcaggtgatcaatgatctccgcacatgatcgctgtatcatggttcggagcaattcctccttattggcatagtgatcataaaaggttgcacggcggatattgcttttccgggtaatatccgaaattgtgatggctgcgtagtcttttttctccgccagcacgtccagaaatgccttctggagcgcctctctcgttcgaaccacacgcctgtcgatttgcttgtccttctctcgctctcctggcacagcttgtccaaacagccaataaaatctcttttgagaaacaagctcccataccttttggctgatagcttccggagtcgcggccgcatcctcattcagccaatacaggataatcgcgtacgtgtacaaggcccggtaatgtccgtaaatttcccgttcgatcggcgtcaaattcacatggaccggagtcagcagcacatcctgctgaaacacatccttaaaaaaacgatggaaatgccctctgttcatcatcacagaaaaaaaggatcgatgctcatgaacaaaggacagcgtcggatgcaccgtttgccgttttttgttcaaatggagggtatccatatgactgaaggcgccaaaaagcgctttgcccagcccttccttcttgtcttcgattaaatcctcaatgattgaaaacttatcctcataataaaggtagagcgatccgcggctcactttggccttttcagcgatttctttcattgtgatgtgttgaatatctctttcttccaataaagccagcagcgcctctttcacttgagcttcggcagattccggcacaaaagacacccccaatcattagacagatcttcgatatatgtacggtaacgtatagatggttcaccgttgtctttcttacagaaaaggtaccaccttataataggtccgagaaaagaagaaagcaaatgagggggattttacaatggaacagcaagtaaaggacgacatccagcgtgtctttcagcttcagaaaaaacagcaaaaagccttgcgcgcttcaacagcggaacagcggagagaaaagcttcaacgctttttagattccgtcatcgcccatgaagaagaaatcatcgaagcgatccgcaaagacgtccgcaaaccatatcacgaagtcaaaaaagcggaaatcgaaggaacaaaaaaagcgattagagataatatgaataacctggaacaatggatggcgcctaaagaagtcggttcatcgttaagccctgacgcaaacggaattcttatgtacgagcctaaaggcgtcacactcatcctcggcccgtggaactatccgtttatgctgacgatggcgccgcttgccgcttctctcgcagccggaaacagcgcgattgtgaagctgtccgatttcacgatgaacacgagcaacattgccgctaaagtgataagagacgcttttgatgaaaaagaagtcgcgatttttgaaggagaggttgaggtggcaaccgaactacttgatcagccgttcgaccatattttcttcactggaagcacaaatgtcgggaaaatcgtcatgacagcggctgccaaacacttggcatctgtcacacttgagcttggcggcaagagcccgacgattattgacagtgaatacgatctgatggacgcagcgaaaaagatcgccgtcgggaaattcgcaaacgccggccaaacctgcatcgcacctgattacctgttcattaaaaaagacgttcaggacaggttcgcggggattttacaaacagtcgtcaacgctggatttatggaggatgatcataccccagaccgcagcaaatttacgcagatcgtcaatgaccgcaacttcaaccgcgtcaaagatctgttcgacgatgccatcgaaaaaggggcggaagtggtgttcggcggcgtatttgatgccagcgaccgcacgatctcgccaaccgttttgaaaaacgtcacgcctgatatgaaaatcatgcaggaggaaatcttcgcaccgattctgccaatgatgaactatgaagacatcgacgaggtcatcgattacgtaaatgaccgcgataaaccgcttgcactttatgtgttcagcaaaaaccaagacctgattgacaacgtccttcagcacacgacatcaggaaatgcggccatcaatgatgtcgtcgtccatttcagtgacgtcaacctgccattcggcggcgtcaacacaagcggaatcggctcctatcatggggtatacggattcaaagagttttctcatgagaagggtgtatttattcaagcctctaaataatcataatgaagagaatctgcatcatcttgcaggttctttttttatctttatatcacctaaataaagagattaaaagtgataaaatacaattttcaaacgagacaaaattcctctagtctatctcattgaaaccctgcagcccctaacgtataatacccagaaaactttaaaggagtaaaatgatacatggaaaaaccagcaggattttggattcgggcagccgcctctattattgatgtatttattatagctatattctctttcattatgattttattaacaccttcattgtgttgccactcattgatgcagcaggtacacacatgtcagaagcccgatatgagtttttcatgttgatcattggcacaatccctgttttggccatcatatttattttcgctattctttactatagcttgctgacttcctcaaacatgcaagcaacattgggaaaaaaactcatgggcatcatcgttgtcaatcagtatagcgagcgtatttctttttggcacagcttcggccgtttcttcgcttacacattatttaagatcttatatatcggttttatcatggcggcctttccctctaaactggcattacataattatatttgcgggacaaaggttgtctataaaaataaatatcttgattgatcaaaaaaacaggctgccgagttaacctcgccagcctgttttactatttcccaaaagccatcagcttcgtataacttccaatataaagcgttccgtcctcagcgagctgaggagatgacactacgttgctgtcggtttgatatttccataattcattgccgtttgcgtctgccgcataaaccttcatatcatctgacccgaaataaaccgttcccttcgcgtcaatcagcggcgccgttctgacagggccgtctgtgtagaatgaccagttcatatccccgtttttgctgatggaaaacagctcgccgcttcctgagccgatgtagatattgccattatgatcaatcgcaggagatgagctggagaacccgtttagcgggaatgtccatttcaaactgcctgttgatgtataagcatacagctgtccatcttggttgccggcataaatgtttccgtccttatcaatcaccggatatcctttaaacgcatttgacgtcgttctggaccatttcacctgtccggttccggagttgatcgcataaaacacgtaattatatgtgccgacatacacggtgccgtttttggcaagcaccggcacagagctgacgacaccatttgttttcaacttccagcgctctgtccaggttgattttgacgtcggtttgatcgcgtgaacataattatcaagtgttgagaaatacaacgtcccgtctgaaccgatcaccgtttcagagcttggcccgccgcttaacggaaccgttgttaaaatttctcccgtttctttgtcaataaaataaatctttttgtcataggatgccaaatagataacgccgttggtcccaagtacaggagattgcgtatatgtttttccaagattgcccgtcacccatttgactgagccgtctggattaaaggctttcatttccccgtctctggaatgaagatatactgtgccgtctccgtcaatcacagcccccgctccattttgcggagtcgttctgatgtcgttttgccatttcagcgtcccatctgtatttccggcgaaccggctttcgcgtgaccagttaaacatggcaggcgccatcgcttgtacatcatatcttcctggcaaaaagccagatgctccattattttgagaaaacaccgtttccgccgcataagcagctgtcggctgaagcactttggcagcgggcacatcagaaacagcgccggccgaaacagccgccgccaccgcagctcccgcaatcaaagctttcatacgaaatgacttgaccatcattgagacccccattatatgtaacttctaatttgtgaccatcataacatattcatccattttataaatctatttcacaaaaacatcacaaactagaaaactatgtaagagtattcacggacgttttttcagcacccggccgaaatgcagccacaaaccaaatgacgttgacagcagccgcagcgagactaattccgaaaacaaagatcacctcagaaagcagatggtcactaaagaaactaaacatcaagataaaaccggccgaagacaaatgaatcaaaagcccgaagccgcaaagcaccgccatgacatacctcattgcatcgactccgagcatataaacgagaaatggaatgaaatacaatacaaggatcataccgacagctgaccacatgccagctgaattaaactgattggccgccgctcccgttccggccagcggcgtaagtgaagccgccactatcacggcgcaaaaaagaaacgcagaaatggttgtcatgatcgccacgctattttttttagacatcaaactcctcctttaatagaaatattaacctttttcattataagtaagttgaatgttatattcattatattttttaaaaaaatccagatcgtacaaaaatgatatgattctttctagtatatttatatagtaaaaaacaaaggataaaagactcatttttctgtaatatcaggattttatcaccataccatattgcatgtacttgtttttcaaagtatactattccagattaattcagaggagagagaaaaatacatggaaaaaccagcaggattttggattcgttttttagcttattttattgatggcattattgtatctgttcctagttatattattctatttgtgatcaattctgtttttgtagctggggctgtggcaacaaacccttacatgacggaagaagagtatttagtgaaatacatgacgcttgcatttttgcctactatgctgatcatgatcgtcatcagtgtgttatattacgggctgctcacagcttctaaaatgcaaggcacacttggcaaaaaaattcttggcctgaaagtggtcaatgaacaaggtgaacgggtttctgtcggacagggaattggccgttactttgcctatatcttatctggaatcatcttttatatcgggtttatcatgatcgcctttggagagaaaaaaggcctgcatgacatcatttgcaaaacacgtgtcgtgtataaataatagaaaaaagtctagacgccaataggcatctagacttttgttttctttacaataggctgccacgacagatacgtagcgcttctccacagccactcaaacggccccatccgaaagacacgaagccaaaggtggctgaagaccatttgaacggcacaaaccgtaattgtaatgagcacaccggcagcagggtacacttttccatacaggcccaagccgtaatgataaaaaatccaagtacacacaatagactgcatcaaataattggtaaatgccatcctcccaacagcggagaatgattgcagcactgttctcactcttgttttatgataaagatagacaaccgttgtaacatagaaaaacatgaggaaaggcgcgccaatcagcagaaatagttccttttccgttacactgtacagcacatgggcgccgatgccgatgacaagcccagccatccataatcgttttaatcctttgcgatgcttttccggttcatgcaaataccgtgattttgctgccgcagctcccagcaaaaacatgctgaaataaggaatggatgcaaagaagaagttgagcggattatacgtaagcatgccattcgaagacatataaacaagacggtcatggatccgctgttctgcaatgtccttcaggctgccgcttccataaacatgaatcgcttgtgttgcctgctgtgttaccgcttgtacccattcctgtccgtttgattgatcaaaacttgtcaacatgaacggaatggaaaacagaagatacaaagagaccgcccatatcagcagtgttttcggctttgcttttcgaaacaagagcaggacaaaaccgagcaaggcatattctgttaaaatatccccgtcccatatcaaaaaggcatgaatcgttccaaacaagagaagcgccattaaccttctcacatataacggaacaaaccgtttccctttgttttctgctctctccatcatgacaaccatgccaaatccaaataaaaaggaaaacaataaaatacattttgtttgaatgaagaatttcagtatgtctgcggcggcaaaatcagcttcagaccacttatccatgaaaaaattctcttttccaagcatagacaaatacatatccggataactgaaatgtgccagattgacaaataagatgccgaaaatcgccattcctctcagcacatcaagcacaccgatccgctcatttgttaaagtcggctgtaatgaagacatagccatcacgctccttttttctgtaccttaagggtatgaaaaaatgaagcgcggaaacatcgatttaggtgtcaggccggcatgaaaaccttacaatcttgtcatctttatggtttcatcacctttaaatctaatgcttcgatattctgcaaaacgcgatcaaaacgcaaagcctgaggctcacatgggaagatgtggccttcatacgggtcgcctaacgtccggaaaaacggttcaaataaaccaggaaccaatacgcccaccatctttgtatagtaagaatcaaggcgataggagtgaacggtatttgcagggacatgcaggaaatctcccggattcagctgaatttcctggccatctgcccacatcgtcatctggccttcaaggcaataaaatgtttctgtatgatgttcatggtagtgatcaacgattcggtcacctttagggccttcagaggatacgacgataaactggccatctgtatttttttgtgcagccacaatgcggtgaagctgatctccagtcaacaggcgatctccttctccagattcaagaacgtatggaaccgctccatctggcagctctgtaagttccgctaatttggccgaacatgcaggcttttcttcatctagaaatacaatgtccgctacagcggctgcttctgcaaatcgctcgtttgagacttcttcgcttgcgtacggcggatgttcagcgtgatcatacggattcccaataacggaatacaagtgcgctacgtttcctttcatcgtgtaagataccagtcttgttctgtggctctgcatccggtagctgtgcggtgttcccgccggaatgttggcataatcacctgatattaataaatagcgttcaccatcaagtgtcagttccagtttcccgtccaaaacgagaattccttcatgtgtgtccttgtggacgtgaagcggaaaggcatctccttttcccccggaaagaagcacgatctcaaacaaatcacctgtgctcctcccattcgcaatcaccgtggcaacctgtctgccgaacagatagcgctcgccttctccgctccggagcaaataaggcattttttctttgggcaatgaatgtgtacataatgttttcatattatcgcttcctccaatttagaccagtctatatactataactttctgactagaccgttctatataattgtaggagaaaggataacaaaatgctaccctttttttctcaccagcactggtatttgttcggcaatgagaagaagaggcgttttgtctttattcgttaacgaaagcatgatgccgccctcaatcatcgaattaatcagcgttccaagctgatttgcttcttcttctgcaaatccgttttccattaattttctggcaaaaaccgcttcccagcttttaaacaccttcatgcaaaccgtccgtagcggttcactgattaacgctgtctcactcgccagcaaaccgactggaatacctttaatgctttctgtgttgtcaaattggctggctgtttttttgataaaaagctgaatcgcttcaataggatcagaggattcatccatgctttgctgtatcagatgttcaacgatcttacctgtatatgtaaccgcttcaattgctaattcttctttgccattcggaaaaaagtgataaagcgatcccttaggagcaccgctttcttttacaatctggttcaaacctgtcgcgtgatatccttgcagctggaacagacgtgacgccgtgtgaaggattttttcacgtgaatctcctctgctagtcattaaaacattccctcctaggtatggtagagcgacttatataatataaaaaagaaccctgtgattgtcaaaaggggtaagacccttccggatggggtaatgtacaaaaacagcgtctaggagggatctctcaatgacaatcgatcattcagtcacgaatacagagcagcttgaacaacagaaccccggcatgaaaacgaagatcaaactgaaaaaactcaaggatcaggtgatcgtcattaccggcgcttcaagcggtatcggacttgtcacggcgagaatggcagctgaaaaaggcgcaaaggtcgtggcagcagcgcgaaatgaagacgcgctgaaggagctcactgatgaacttaaggaaaaagggcacgacgccatatgggtaaaggcggatgtcggaaaagaagcggacgtcaaccgcatcgcagaaaccgcgatcagcacattcggccgctttgacacatgggtcaacaatgcggccgtctcgactttcggacatgccatggacgtcaccgttgaagacatgaagcgcatgttcgacacaaatttctggggacctgtttacggaacaagagcggctgtcaaacactacactggcagaggtgtgccgggcgcactcattaatgtaggaagcctgttcggagacaggggaacagtcattcaatccacatatgcgtctgccaaatttgcgcttcacggctggacggaaagcatccgaatggagcttgaaaaggaacaggcgcccgtctcggtaacgctcatccacccgggcagaattgacacgccttataacgagcatgcgcacagctacctcgacaaacagccggctcattaccgctccatgatctatccgccggaagcagtcgccgaagctatcctgtttgccgccgaaaaccctaagcgcgacatgtacatcggctcacaggccaaagccatcgccatgctgggcgcgcttttccctcgtctgaccgacagactgatggaaaaaatcatgtatcacagccagcatgccgaaagaccgtccaaaccgcgagaagaaagcgctctttatgatgcgggctgcggtatgcatgacagaggcacaaataaaggatggatgaggtcaagaagctactacacaaaagcgacgaagcgccccattgtatcggcggctgttgttgccggactagtggcttgggctgccgccaaacgatgcagataatctctgaccatgatagaaaaacccatgctgttccagcgaaccatgggtttttcagctgttaatcgataaaagccttgttcatacgctgcagcagctcgccaaacatctctttttcctgtgttgaccattctttcagcatctgttcataacgttcaaggcgcttttgctgatcggcttttaatagttgtttgccgagttttgtaatggtaaacaggctgactctcccatcagatgggtctgagaaacgatagatgagctcctttgcctctaatgcagctgcttgtcttgaaagagtagaaatatcaagcttaaacgattctgccaattccttaacacgagcaggcccaaactcatccaattgtctcagtaataagtacgaagatctctccaaattccctgttcttttctccgattgatccagataaacagctctcctgataaaagtcgtcagctcatattcaattaattcaactggattttgattttgcaatcgctctcgctccctattccaatctccggcattgacaacatcatatatacttgtataatacaaatgtacattaactgaataaatacaagtcgttatatgactaaatcaattattatacttgtatagtacaatcatataaaaagaaagtaaagcgattcctcagaaccatcctagaagcaagcaccagaaaggaggaagctgttctgattggagagcagcacttgatgtgaaagtcatacgaattattttgcaagtgttgatattatatgtattttttatgatcggggaagccattcagcatctgtttcatttacccgtgtcaggaagcatcgttggattggtattgcttctgatctgcttgggcctccgtattgttcccgtctccatcattgaagacggagcagggtttttattatccttccttccattgttgttcatcccggcaatgacaggagtgataaactatccgtctctcatttcattcaatggcctgatgctgctgattacagtcgttctgagcaccatcgtcacgatcattgcggctggattcgccagccagctattagagaaaaaagcaaaaaaacgggaggagaaagagaaatgcagcaagcatgtatcgcgatcattataattcttttaacagttgccgcttatttagcgatggtcaaactctataagcgattcccgcttccatttcttatccctgttctgacaacgaccattttgattgtagcggctttgatgatgtttcatgtttcctatgaaggctatatgatcggggggaaatggatcaattctttgcttgggccggctgtcgtggcactggcctatccgctttataaacaatggcatatcattgtcaaacattgtgttcccattttaggcggcgtcctggtcggattatgcatgggaatgatcagcgggctgatcttcgcagaagcattcgggattgatcatgatctcttattatccattctgccaaagtcgatcacaacccctgtcgctattcagatcgccgccggtcttggcggcgtcccttccatgacagtcgtatttgtcatgattgcgggcttttcaggcgtcatcctcgggccgcttttcctaaaatggcttcgcatacgcagttccctaggacaaggcattgcattaggcagcgcctcccatgcactaggcacctccaaagcattggaatatggagaactggccgtctccatgagttccgtctccatgacgctttgtgcggtgctcggctcattcttcggcccgctcgtcgtctggctgtttcatatttaacaaagaaagactgccccgggggagggcagtctttttcgtttaagaagcaaaaaaatcaatcagcggctgaaagtccttagataaatcaacgtcattcggttctgcttgaagcaggcggtcaatcatacgctccagctcctcaacatcattcttatccgtatattcaatgaagtttaagctttcaagccaatcccgatatgaatgtttggctttgccatagctgtttccaaagacaaggcaaggtgttttggtgataatcgagaaaatcatcgcgtgaaggcggtcggtaatcaccaatttactggagccgatgcggtccagcatctccataaaatgcttttcacgatcagcgtaatcgatggtgtctaccgtatccagcaccgtatcggtacgctctgtgtaagttgttttttctgcccattgcttcatctgtgaaataaaatcttcgtcagtcactttctccttatccgctcttaaaataaagagaacgccgtcccgctcgagctctcgcggcacaatatccaaggaaagcaccatgtccggtgtaaagatcacattggagttgaaggtctctttcacaacatccagtgtttgcgtctcacgcgcagcaatcgttaagtttgtattttgatggtacgcatcctgtgtttttttcttttccttctgtccttcctctgtatcctcaaaataaacggattgtggcagagaaattgatttgtagtctttaaacgccgaaaagacctttcttctgtcttcctcaatatcgagataaaggtttcctaagttccctccgcctgtaaagcagacaatatcgtcttcacgaatgatctccttcaccagttcaatgccctcatccgtcgcataatccataatctcaatgtattcataatacggaaaatgatttttgataaatttctcttccgcatacgcaatcgcttggtctccaatgtttgtgtaactaggggaaccaaacaaaaatacttttcgtttatcatttaacagagcttccggctccacatttggcgcaatgccttttactagttttttgcctttgattttttgtacagtcatatctgcgtcctccttctgggatgaattcctcattgtgtgttaactgtctctacccaaaaagaaggatggctatgcattggcatgtgcatcggctatatcagaaacatcgttttcgccaatttgatagacgctgcaatgtcccgcgccgttctttccatatattccgcggcatgttcaaacgcatcttctagcggcacggctccggggacgatgctgaaaagcgcatcgattccgtgttgatagacggcatcactgtcacgtgatactgatcccgcaataccgatgacaggcacatcatatgatttagccgccttggctacgccgatcggcgtttttccatgaaccgtttggctgtcgatccgtccctcgccggtaatcacaagatctgcatcctgaacgatactttcaaaatcaaccgcttcaaggacaatatcaatgcctcttttcaggtcagcctgaagataagtcagcaggctccatccaagaccgcccgctgcaccggcgccctctgtatctcggaaggttgatccgagctctttttctgtcatatcagcgaaatggcttacgttctggtctagtacatccagcatgtcggccgtcgcgcctttttgcggcccgaaaacagccgtagcgccctttggtcctgttaacggattgtccacgtcacaggcaacttccagtttgacattccgcaatctggaatcaagcccgccaacatctattgatgcaagctgagataacgcgccgcccccgggccaatctcgcggcctgagttatcaagaagccttccgcccaatgcctgaatcatcccggctcccccgtcgttcgtggcgcttccgccgattccgatgatcaatcgctccgctcccgcatcaagagctgctccgattaattctcccgttccccttgttgtagtgatgagcggatttcgcttatctacaggcaccagatgcagccctgaagcagcagccatttcaatcacagctgttctcccatctcccatcatgccaaagaaagctctcaccggttcccccagcggccctgtgacaacttgctctatgatccttccattggtcgcatcgaccagagattgaacggttccctcgccgccatccgccaccggcaattttctgtaatcagcacccggaaagaccgatttgaaacctctttctatcgcttcggctgcctccagagctgataagctttccttaaaagaatcaggtgcaatgatgattttcatccaaatcgcctctttcaaaacatgattcacttacgctagttatctccaatgtaccatattccatttagaaataaataccataatgattgggaaaaattttattaaaaattagaaatgaaagtgtttgcataaaagaaatattcacgttatcatacttgtatacaagtatacttcttgagtgaggaaggtgagtgtatgctagactccaaagacctgttgtatcccgcaaaatggctctcaaaagcgtcaaccggagttcgtgtcgcatacgagctgagaatgcggatcgtttcaggtctgattgaaagcggtaccattttatcagaaaatacaatcgccgccgagttttcagtaagccgttcgccggttcgcgaagcgctaaaaatactcgcatccgaaaaaatcatccgcttagaacgaatgggagcggtcgtaattggtttaactgagaagaaaatcgcggaaatttatgatgtgcggttactattagaaacatttgtctttgaacggcttgtcaaaatagacattgagcctttagttaaggatctcagcaaaattcttgaaatgatgaaagtctcaatcaaatatgaggacgctgacgaattttcatttcaagatgtgctgttccatgaaacgattatccgagcgattgatcattcatacattcagatgatctggaacaatctaaaacccgtcatggaaagctttattcttttatcgatgcgggtacggttaaaggaaaagtatgaagacttcacaaggatcttagataaccacgagctttatattcaagccatcaaaacaaaggatagggtgctgatgattcagtctcttcaccaaaactttgatgatgtgcaggataaggtagaagacctatggctctcacaacaaatgctggcaaaaggagctgaatacaacaatgactagttatatgttaggaatcgatatcggcacgacaagcacaaaagctgtgctgttcagtgaaaacggagatgtggtacagaaagaaagcatcggctacccgctctatacaccggacatctcaacagcagaacaaaatccggaagagatttttcaggcagtcatccatacaacagcgagaattacaaaacagcatcccgaaaaacaaatctctttcatttcgttcagcagcgccatgcacagcgtcattgcaatcgacgaaaatgacaagccgctgacgccatgcatcacatgggccgacaacagaagtgaaggctgggcgcataagatcaaagaggaattgaacggacatgaggtgtacaaacggacgggaacaccgattcatccgatggcaccgttaagtaaaattgcctggatcacgaatgaaagaaaagaaatcgcttccaaggcaaaaaaatatatcggcatcaaagaatacatttttaaacagctgttcaatgagtatgtcatcgattactcattggcatcagcgacaggcatgatgaacctgaaaagcttggcttgggacgaagaggcactgcgcatcgcaggcatcacgccggatcacttatccaaactcgtgccgacaaccgagatctttcagcactgcagcccggaaatagcgatccaaatgggaatcgatccggaaacgccttttgtcatcggggccagcgacggcgtgctgtccaacctcggcgtcaacgccattaaaaagggagaaatcgccgtcaccatcggtacaagcggtgccatccggacgattattgacaagccgcaaaccgatgaaaaagggagaattttttgctatgccttgacggacaagcattgggttattggggggcctgtgaacaatgggggcatcgtccttcgctggatcagagacgagtttgcctcctccgaaatcgaaacagcgacacggctgggcattgatccatatgacgtgctgacgaaaattgcccaacgcgtcagacccggttctgacggtctgctgttccacccatatctcgccggagaacgcgctccgttgtggaatccggatgtacggggctcatttttcggcctgaccatgtcgcataagaaagagcatatgatacgcgcggcattggaaggcgtcatttacaacctgtacacggtgttcttggcgttaactgaatgcatggatggcccggtaacccgcatccaagcgacagggggatttgcaaggtcggaggtttggcgccaaatgatgtctgatatcttcgaatcagaggttgtcgttccggaaagctacgaaagctcatgtctcggcgcctgcattttaggcctgtatgcaacaggaaaaattgactctttcgacgccgtgtccgacatgatcggcagcacatacagacatacgccgatcgaagactcagccaaggaatacagaacattaatgccgattttcatcaatctatcaagattattagaaaatcaatatacacaaattgcagattatcagaggggcttaatcacacacaaatagtacatgacatgaaggggagggcattaccatgccgttaatcatcgttgcacttgggatcttagcattactatttctgattatgggcttaaaattaaacacatttatttccctgctggtcgtatcgttcggcgtggcactggcactcgggatgccgttcgataaggttgtcagctccatcgaagcagggataggggggactcttggccacatcgcgctcatcttcggactcggtgcgatgctgggcaagctgatcgcggattcaggaggcgcacagcgcattgcgatgacgctcgtcaacaaattcggcgagaaaaatattcaatgggccgttgtcattgcctcatttattattgggattgcgttattttttgaagtaggactggttctattaattccgattgtctttgcgatttcaagagaattgaagatttctattttatatctcggaatcccgatggtcgcggcactatccgtcacacacggtttcctgccgccacacccgggacctacggcgatcgccggtgagtatggcgcaaacattggagaagtgctgctgtatggctttatcgttgctgttccgacagtgctcatcgcagggccgttatttacaaagtttgcgaaaaaaatcgttcctgcatcatttgcgaaaaacggcaatattgcatcactcggcacacaaaaaacgtttaaccttgaagaaacacccggctttggaatcagtgtctttactgcaatgctcccgattatcatcatgtcggtcgcgaccattatcgacctgcttcaagaaacaatcgggtttgcagataacggaattttagcttttatcagattgattggaaacgcatcgactgctatgattatttcgttattggtcgcagtctatacaatgggcatcaagcgcaacattccagtcaaaaccgtgatggattcttgttcaactgccatttcacaaatcggcatgatgctattgatcatcggaggaggcggcgccttcaaacaagtgctgatcaacggcggtgtcggcgattacgtagcagacttattcaaagaaacggcattatcgccaatcattctggcatggctcatcgcggcgatcctgcgcatttctctaggctcagcgactgttgccgcactaagcacaacaggtctggtcattccgttattgggccattctgatgttaacctggcgttagtcgtactcgcaacaggcgccggaagtgtcatcgcttcacacgtcaatgacgccggcttctggatgttcaaggaatacttcggattaagcatgaaagaaacattcgccacatggacattgctggaaaccattatttccgttgctggactgggattcattttattgttaagtttagttgtatgaaattaagaaggagctgtaacacatgttcaattcgattggtgtcataggcttaggcgtaatgggaagcaacatcgccttaaacatggcaaataaaggtgaaaacgtcgctgtctataattacaccagagatttaacggaccagcttatccaaaagctggatggacaatctctcagcccgtattacgagcttgaggactttgttcaatcgttagaaaaaccaagaaaaatctttttgatggtcacagcgggaaaacccgtagattccgtcatccaatcattaaagcctttgcttgaagaaggcgacgtcatcatggacggaggaaactcccactatgaagacacagaaagaagatatgacgagctgaaggaaaaagggattggctacctgggagtcggcatttccggcggtgaagtcggcgcattaacagggccttccatcatgccgggcggagatcgcgacgtctatgagaaagccgctcctatcctgacgaaaatcgcagctcaagtcggagatgacccttgctgtgtctatatcggaccaaaaggggcagggcactttacaaaaatggtgcacaacggcattgaatatgcagacatgcagctgattgcagaagcgtatacgtttctaagagaaacgcttcatctgccgctagatgaaattgcatctatatttgaaacatggaatcaaggtgagctgaaaagctatttaatagagattacagctgagattttacgcaaaaaagacgaaaaaacagggcagcctctgatcgatgtcattcttgataaaaccggacaaaaaggcactgggaaatggacgagcatgcaggcgattgataacggcatcccgtccacgatcatcacagagtccttgttcgcccgctacttgtcatccttaaaagaagaacggatggcagctcaagacgtattagcaggcccggaagccgaagaaaaacacttggataaagacacctggattgaatacgtcagacaggctctttacatggggaaagtatgcgcctatgcacaaggctttgcccaatataagatgtcatctgagctttacggctggaatctgccgctcaaagacattgccttgattttccgaggcggctgcattatccgcgctgatttccttaacgtgatcagcgaagcattcagtgagcagccaaatctggcaaacctgctgatcgcgccttatttcacagataagctccatgcctatcaaacaggcctgcgaaaagtcgtttgcgagggaatcagcactggaatctccttcccatgcttaactaccgcgctctcttattacgacggctaccgcacagggcgttccaatgcgaacctcttgcaggcgcagcgcgattactttggcgctcatacgtacgaacggactgatatggacggcgtcttccatacgaattggtctgaataacctgtcatcaaaaacacggtcagttttcaactgaaccgtgtttttttcttctatcccaaacaacagaagacataagttatgttttaaatatcataaacagtgatacaataatagctagaaacaatccccaagatcatcatgtgacagcagcttgctgttccgttctattctgcttttggccattgtcctttgcccttgcccatggtgtcataaaatgttcaaatgccaaaacggcctgtcattctgatttacaaaagtccctgaaaaccttgtctaattgagaatcagcctctcatttgttataaaagaaatgcataaatcctacctgtcacaccttaaataagttgaaaaaaagtaggttatcgcttgacaaaaaatatatattaattaataattcatatataattagaattattattgaaagcgaatatgctttctaatacatttttaggaggaatatacattatgtctttaatcggtaaagaagtacttccattcgaagcaaaagcattcaaaaacggtgaattcatcgatgtaacaaacgaagatttgaaaggccaatggagcgtattctgcttctacccagcagatttctctttcgtatgcccaactgagcttgaagatcttcaagaacaatatgctgctcttaaagaattaggtgttgaagtatactctgtttctacagatactcacttcgtacacaaaggctggcatgacagctctgaaaaaatcagcaaaatcacttacgcaatgatcggtgacccatctcaaacgatctctcgcaacttcgatgttcttgacgaagaaactggccttgctgaccgcggaacattcatcatcgatccagacggcgttatccaaactgttgaaatcaatgcaggcggtatcggccgtgacgcaagcaaccttgtaaacaaagtaaaagcagctcaatacgttcgtcaaaacccaggtgaagtttgcccggctaaatgggaagaaggcggcgaaactcttacacctagccttgatctagtaggtaaaatctaaggagtgcattcaattggtacttgatgcaaacatcaaagcacaattaaatcaatatatgcagctaattgagaatgacattgttctcaaagttagcgcaggcgaagatgacacttctaaggacatgctggctctcgttgatgagctggcttccatgtcatcgaaaatttcagttgaaaaagctgaattaaacagaacgccaagcttcagtgtcaatcgtgtcggagaagacactggcgtgactttcgccggtatccctctgggccacgaattcacatcattagtgttggcgctgctccaagtgagcggcagaccgcctaaggtggaccaaaaagtcattgatcaggtgaagaagatcagcggtgaataccacttcgaatcttatatcagcctgacatgccacaactgtcctgatgttgtacaagctttaaacatgatgagcgtgctgaacccgaacattacgcacacgatgattgacggtgcagcatacaaagcagaagttgaaagcaaaaacatcatggcagtgccgaccgtttacctgaatggcgaatccttcggaagcggccgtatgacgcttgaagaaatccttgcgaaaatgggcagcggcgcagatgcatctgagtttgctgacaaagagccgtttgacgttcttgttgtcggaggcggacctgctggtgcaagtgcagcgatctacactgcacgtaaaggcatccgcactggggttgtcgctgaacgcttcggcggacaggttctcgacaccatgagcatcgaaaacttcatcagcgtcaaagcgacggaaggaccgaagcttgcggcaagtcttgaagagcatgtgaaggaatatgatattgatgtcatgaaccttcagcgtgcgaaacgccttgagaagaaagatctgttcgaacttgaactcgaaaacggcgctgttctgaaaagtaaaacagtgatcctttcaacaggtgcacgctggcgcaatgtcaacgtacccggtgaacaagagttcaaaaacaaaggtgtcgcatactgcccgcactgtgatgggccattgtttgaaggcaaagacgttgcggtaatcggcggcggaaactctggtatcgaagcagcgattgatctagcaggtattgtgaatcatgttactgtgctagagttcgcgccggaactgaaagcagacgaagtcctgcaaaaacgtctctacagcctgcctaacgttactgtcgtgaaaaacgcacaaacaaaagaaatcacaggtgatcagagcgttaacggcatcacatatgtagaccgcgaaacaggcgaagaaaaacacgttgaacttcaaggtgtattcgtccaaatcggtctcgtgccaaacacagaatggttagaaggaacggttgaacgcaaccgcatgggcgaaatcattgtcgacaaacacggcgcaacaagcgtaccaggcttatttgctgccggcgactgcacagacagtgcgtacaaccaaattattatttctatgggatcaggtgcaactgccgccctcggcgcgtttgattacctaatccgtaactgataaaaaaatccgctatattgccagattggcaggatagcggatttttctttttctacagaaaaaacccgaaccaggcactccggtaaaagtgctcgattcgggccagcttcttataggtcctcgccattcgtttgaatgacatttttgtaccactcaaaggaatctttcttataccgcttcatggatccgtttccttcattgtcacgatcaacatagatcatgccgtagcgttttttcatttcgccagttgtgaaggagacaatatcaataatgccccacggcgtgtagccaattaaatcaacaccatcgtacgtgaccgctttttctaatgcttcaatatgcgattttaaatattgaatgcgttccggatcatgaaccttgccgtcctcctccagcgtatccactgcgccaaagccattttcaacgatgaataacgggatttggtaccgatcataaaaacgatttaacgtatatctcagcccggttggatcaatcgcccatccccagtcactcgaagtgatatacggattttcgacaccattcggcaagccgccattgacaatatcgccagtgttatcatttttcacatcgcttttcacagttgttgacatgtaatagctgaagcctaagtaatcgacggttccgtttcttaaaatctcatcatcgccgtcttcgaatgtgatgttgtagccttcgcgttcaaattccttcaacgcgtagcttggataataaccgcgaacctgtacatcagggaagaaatagcgctgcctcatttcttcttcagccagcatcacatcttcaggattggaggagaaaggataaatcggcacgtgtgataccatagccccgatctggaactctggattgatgtcttttccttttgccactgctaaggcgctcgccactagttcgtggtgtgccgtttgatacatgacctccttggcgttttcgttttcgccaaccacaacacctgaattcgtccataggaacaacggattgttcacatccatttggttgttgatctcgttaaatgtcatccagtactttactttatctttgtaacgggtaaagcaagcctctgcaaagttgacgaagaagtccacgactttccggtttctaaagccgccatattctcttgccaggtgcagcggcatttcaaagtgagacagggtaatgaccggctcgatcccatgcttcagcaattcatcaaacacatcatcataaaactgcaaaccagcttcgttcggttcagcctcatcgcctttcggaaaaatccggctccagccgatggacgtccgcagacattttaatcccatttccgcaaacaaagcgatatcttccttgtatctgtgatagaaatcaatggcttcatggttcggataaaactcgttctcttcaatcgtatccgtgatttttctcggcacgccatgtgcacctgctgtcatcacatcgacgacactcggccctttacctccttgattccatccgccttcaaattggtgggcagctaaagcaccgccccataaaaaatcctttggcatgtttcccatgtttaattcctcctcagcttacgactgtaaatattttttgatgcaatgcactttcctcaatctcttcaatgaaagctttaacaaactcatcgccttttttgacggtatcgccttcttttaccttcaaggaaaaaggcgtgccgtcaaatgtcaccgtatccagcccgatgtgcgcaagcaattcgacgccggacgctgaacgcagctttgtaggcgccaccatgacaaccgtaataacgccgggatggtggcatcgattttacgatatccttcgctttaggggtagaccgcttcagcaccaatcgaagtctggtagcgcagcgagaagccccaatcacattctcttccccgcctacggcctctaaaatgtcttttgctagtctcgtataatctctcacttccccgacatttcacccacccctttgatttggttgcgctttcattataattgtaccggtataatatatcaataccgaaacaaaatatttacgcactaactatcattgtaagcggtttatgctataattttggcagtgaaactaaacgaataaatgaggaatgcgtatgttaaaataccagcaaatcgcagcggaaattgaaacatatatagaagaacaccagcttcagcggggagacaaactgccagtcctagaaaccctcatggcccagtttgaagtcagcaaaagcacaatcacaaagtccctcgagctattagagcaaaaaggcgcgatctttcaggtcagaggaagcggcattttcgtcagaaaacataaacgaaaaggctatatcagccttctgtcgaatcagggatttaaaaaagacctcgaggatttcaacgtcacctcaaaagttatcgaactagacgtgagaaagccaactccggaagcggcggaaaacctgaacatcggaatggacgaggacatctactatgtcaaaagggtccgttacatcaatggccagaccctttgctacgaagagtcttactacaacaaatcgatcgtgacgtatttaaacaacgaaatcgtctcccactccatcttccattacatccgggaaggactggggttgaagattggtttttctgatttgtttctgcacgtgggccagcttaatgaggaagaagcggaatacttgggattagaggctggactgccgaagctgtatatagaaagtatttttcacctgacaaatgggcagccgtttgattactcgaagatttcgtataattataagcagtcgcagtttgtcgtacaggctaatagttttttgctgtagagctgcttcactatggaaggtggtcgacatgaacaaaatcatcattcctgcaatactagccatctttgcgctctggatattcttacagatttcactagagatgagcatcgttaagaatccaatgaactactttatcgtattcattatctttttcctctttgtaaagatggtgaaagaaaaacaataatagtttactttgaacaggaaaccagatttgacatctggtttttttgtgtttcactttattcatccgtttcaattgtctctaaaagcagttatgcggtactatcatataaaggtccaatgtttaaaaataatgtcatacttttaaattcaccttatcatgcacatgatcatatataggggtttattctaaaaaggggatggacgattttggaaagcaagtacctagatctactcgcgcaaaaatacgattgtgaagaaaaagtggtaacagaaatcattaatttgaaagcgatattgaacctgccaaagggcactgagcattttgtcagtgatttgcacggggagtatcaggcattccagcacgtgctgcgcaatggttcaggacgagtcaaagagaagatacgcgacatcttcagcggtgtcatttacgatagagaaatcgatgaattagcagcattggtctactatccggaagacaaactgaagttaatcaaacatgactttgatgcgaaagaagcgttaaacgagtggtataaagaaacgattcatcgaatgattaagctcgtttcatattgctcctccaagtatacccgctccaaattgcgcaaagcactgcctgcccagtttgcttatattacggaggagctgttatacaaaacagaacaagctggcaacaaggagcaatattactctgaaatcattgatcagatcattgagcttggccaagccgataagctgatcaccggtcttgcttacagcgttcagcgattggtggtcgaccatctgcatgtggtcggcgatatttacgaccgcggaccgcagccggatagaattatggaagaactgatcaactatcattctgtcgatattcagtggggaaatcacgatgtcctttggatcggcgcctattccggttccaaagtgtgcctggccaatattatccgcatctgtgcccgctacgacaacctggatattattgaggacgtgtacggcatcaacctgagaccgctgctgaatctggccgaaaaatattatgacgataatccagcgttccgtccaaaagcagacgaaaacaggccagaggatgagattaagcaaatcacaaaaatccatcaagcgattgcgatgatccaattcaagcttgagagtccgattatcaagagacggccgaactttaatatggaagagcggctgttattagagaaaatagattatgacaaaaacgaaatcacgctaaacggaaaaacatatcagctggaaaacacctgctttgcgacaatcaatccggagcagccagatcagctactagaagaagaagcagaagtcatagacaagctgctattctctgtccagcattccgaaaagctgggccgacatatgaattttatgatgaaaaaaggcagcctttatttaaaatataacggcaacctgttaattcatggctgtattccagttgatgaaaacggcaatatggaaacgatgatgattgaggataaagcctatgcgggtcgtgagctgctcgatgtatttgaacggttcttacgagaagcgtttgcccacccggaagaaaccgatgacctggcgacagatatggcctggtatttatggacaggcgagtactcctccctcttcggaaaacgcgccatgacgacatttgagcggtatttcatcaaagagaaggaaacgcataaagaaaagaaaaacccgtattattatttacgtgaagacgaggcaacctgccgaaacatcctggcagaattcggcctcaatccagatcatggccatatcatcaacggccatacacctgtaaaagaaatcgaaggagaagacccaatcaaagcaaacggaaaaatgatcgtcatcgacggcggcttctccaaagcctaccaatccacaacaggcatcgccggctacacactgctatacaactcctacggcatgcagctcgtcgcccataaacacttcaactccaaggcagaagtcctaagcaccggaaccgacgtcttaacggtcaaacgattagtggacaaagagctcgagcggaagaaagtgaaggaaacgaatgtgggtgaggaactgttgcaggaagttgcgattttggagagtttgcgggagtatcggtatatgaagtgagggatgtggggttcagggattatattctttgggcccatttttacaatcaactataaatcaacaaaaagcctctcaaaatagggttttgagaggctcactatcaaacatgaaaagtacttctattagtgttaggtcttatgacttgatctacattctcagcaatcgatttataattttgtttttttgataaacgatcataatccccaacaatataaaactctttttttgcccttgtaactgcaacattaattaaattaggctttgagcacgaccaatttgccgctccatcactattttgatctgtccccactacaaagtaaacagtgtcggcttcttttccttgaaaggtatgggtagttcctattgagcttcgagtccaatcatttactattttctttggtacatttaattctgctaaccgctttttaattgtttttctgagaccatctttcactgctgtaaagggagtaataacatataaatcaggagcatttaatgtattttcccatttttgataaatctcttcagcaactaaatctgcctgctcttttacaaactgcttattaaccgctactcccttacagtcaaaccattcgcttttcccttgtttttttatcgctaaaaccattttattatcataagcaatttgattagcgattgtaaacattggatttaagcatctcctatgaacccataaaggtatccctatccactgtcctttattgttatacattccaaatggattcgccgcatccgccagtgattgtacagaactccctatttcaataaaccgatcttcaataccataaaatttttttatatctcctaatattgttcgatcaatggtgacaactggttcaatctggattggatcaccaacaacgacaactttttgagacctccataatgcgcctgccgcttgttgcggagtagcttgtcccgcttcatctataaataagtaacgaataaaatcacgaccaactcctttatacattgttcgaacactggcaaaggttgtacttattacgggtgtgattaaatggattacaccccacatatgttgtaaccacattctgtgctcagtctgatttaaatctaacttacttcgataatttaacaaacgcaaacttgattttattgctttataattaaatatcaaaaacaatttgtggactttcattccctttaaaaaaagaagccctctttcaaaattcaattcatcagttagccaaggagtatgtaattgcctatattcatatgcactttgagaattggtccaataattatcatcgggtattactaacccctgatttttgcatttattgttgatagaatccctatatttctttaactccatccttatttgattcgatctcatctgcaaaagatcccattccttttcttcattttttattttcatagttattttttgcagttgatcttccatctgtaataatttgtttctttttgtatgaaatattctttgaaaaaaagttggtttagaaagcgtgtgaaactctctctctaacaaccgtttctgttgtttataatgagctgtctttaatactaacttttcttgttctgcctctagtaacaataactgattatttatatccttatattttttaaaaatttcgcataacgattgtagttctgctttcttttgtttaactgatttcaatgtttgttggaaatctgttactgcattcttccaatctgttaagcttatttttttattttctcgttctaattgctcgatgaatgatagttcaaattcgttattatttctataataaagttttttgtaatagtgagatatattttccgactttcctaaagatgctgagaatagtccccaagtatctgtctcttcacctagaagagcctttgccgcaaaaggaaacatcgataattcctctgcttctaatgcatatgctttttcataagaagaaaatacattttcatctgtaactttacgtataacttccttctttttaggaagatcttttgagatattttcaactgctccattattgcttgaagccactaccatagaatactgattaatagatttatcaatttcataaatagtataatgatagccatctaaaactaatttctttatttttttcagagctttttctgggttttcaaaacaagccattttttctgctttttcaaccatgagatttgcaaaaatatcttttaacagtgtcgttttccctgttcctggcgggccattcacagagcttatcttttgattgttatttataatttgatttacagctacttgctgcattaaggataatctatgttcaacaggtgacggccacctgccgttaggtacatttttaggctgcaacacatcttcaattaaaactctattttcatcaatgttcgttctattatcaaccccttcaataaattgccgtagtgtttcattttctccttgtgagataatatctcctaagtcctctaagaaaaagctatgaaaattatttacccgtccatcttgtccaaccttcaaaatttctttctcaaaataatgaagcgccatattatctattcgtaaaaaataccgttcatatactccaagtactttcttaagggctttttctgttactccatttacaaagatggcatcaacctgttcctcaaataatctcaactgatctcgaaatgtagtcatcaaatcatcatatggcacttcaagatgttcgtttattaatttcatcacatacataagtacaggtacaaatgcagaatcctttacatacttgcctgtatggtcaactaaaaaagacatactaaataacattttctgatctctattaatcatttcttcattattttggaatagatcacgtagatagctaacaagtttatgttgctcaaagcaacctaaatagtaacgaaattgaataaaatttttttcagagtccttcaactgatgcctctcccaaggcctttcagaaaaaagaacttgttctgttttctttcgttgttgaccatctaaaaaatggcttctactcaattcatctcctataccattgactccgcttggtgataaagcctcaactaagtgccatgcccttaatacagaatttacatttatcttccccataattccctcctatttttaacaacatcattcggttattgtcctcaattgatccaactggtatctgtaaaaaatccctaaactgattgatcagtctcttttctttttttcgacacatttgtttaaatattgaataattaactagatcacacattaaaattattagattttagaacatttcattttagtaaaaattcatgactgattcataaactctgagatcatttgttaaatttatgatacgatgacagtaaaaaagacataacaggggctagtcatatgagtgaacttgtgtttgaaaaaagagattttaatacagaacaaattcttgcgttgaaggcatctcgattagataacaatccgattgtatacattctttataacgaaaaaaagaagccgactgcatatattgggcagactgtgcaggctgcacgacgattgaaaaatcatttgagagacaagaagcgaataagtttaacgcgaaccattttcattggtcatgaaagatttcatcagtcagcttcctacaatattgagacaaatcttattaattactttattgccgaaaatcactaccaattgcaaaatgtcagtcagacaagatcgagagaaatgcatcattattatcaaaaagaattttataacgaacatctttttgaggaaatttggaatcagcttcggaaagagaatgttgtcagcgacacccttgaaaacctcagaaataaagatatttacaaactatctccgtataaagagctctctccccagcaggtggaaatcaaaaatgaaattcttgatttttgcaaggcgcatattgaaaaaccaggtaaccatgtcatttctatagaaggagatgccggaacagggaaaagtgtcttactgagctctctatttaacacgattcaggatttatctaaagatgaaaattcacatttaaaaaacaagaacaattacttacttgtgaaccatggtgaaatgctgaagacgtataaaagcatcgcaaacagcttaccaaatttaaagaaaaaaaacttaatgaagcctacctcctttataaatcaaatgtcaaaaacaggggaaacagctgatattgtattagtagatgaggctcatctgcttttaaccaaagaggatagatacaataatttccactatcgaaatcagctagaggaaatcattaaacgcagtagtatcactattgtcatcttcgatcctaaacaagtgttaaaaattaaaagctattggaatgaaaggttgcttgaggagatcaccaatcaatatcatgcgaaaacagtaaagctcacggagcaaatgagaatgaatgcaaatccagacacactaaagtggattaaccattttgtctcaaaacaattgctccctctgccgcaagaaaataatgataccttccaactcaaaatctttgaggaccatgccgactttaaagctgcaattgaaaaaaagaataatgaagtaggtctatcacgtattgtctcgacctttgactatatccataaaaaagatggtgctacttatatggtcgatgaggaaggcattaacatgccatggaattctacaaatgacaaatggacttgggcagaacatgcagattctattaaagaggttggttcaatctatactgttcaaggttttgacctaaattatgttggcgtcattctaggaccttctgtcagctataatagtgaaaaggatgagcttttcatcgacactgcaaaatataaagatacaggcgcattcaccaaacgagatgacatgtctgccgagaaaattaagaaaataaaggaagagattattctaaactctatcaacgtcctcatgaaaagaggcatcaacggtctttacatttacgcaacggatgtaaaattaagaaatagattgctagagttaaaaaggagaaggaaaaaatgagcgaaatcaaagatttaattaacacgattaatgaatttagagacgcacgcaactggagacaataccacaacccaaaggatcttgccatctctatttcaattgaagcggccgagctgttagaagacttccaatggaaaagcagcgaagaagcactcaaagcaaacgaggaaaacattcgtgaagaaattgctgatgttcttatctattcgctgatgctttgttcagatcttaagatggatgtgaaagagattattgaggagaaggttgtgaagaacggtcggaagtatccggttcaagggtaattatatttcttacaataattaaagcaatcttcactcctcaaaaaataaaagtgcatgacgatatatttttggaatgattaacaaatagattgattcttctgaatatattgtagctcaacttaccgctgagtgacagaaattaatcatagatactgagtttaaaatttactttggatttactaatgtaaattattaaacttaggattttattaaaacaggcatattcaagtatgcctgtttactactttaagaaagaagtaacctcattcacttatggtaaggctctccgtagtgtatctacttttgttctagttcttttaaaacctttaagtcttcataataccttaacaccgtactttgcattactaactttctattggcagaatctctaatgttacgaaatttctcattataaaacagagtaaaatcatgtattgtgctaaataaggttatgttagcttgtacccattctgataatgtctcatcagaaaaaggtaagtcatttgattcaaaaaataaactatccaacactgacgaataaggtgttacacttgcaaataactcatcttcaaaaatagtctcattttgatactcattaaataatgaaattatagattcagcatatgttatcatttgatacctaatttctttaactttatatagtacttcatcgttaggcttggtattatcaaaaataaaattactaattatcttatattggggataaaactcaaaatgaacaccttttattaaatgtttattagagcctttcaaactataccaataagtcttatcttgattatcgcttacccaagtagttttacaataataatttcctcgtaaaatatcactttcataaaaagtgaaataaatccatattatatctgatggacagcctttatatctatcttcttgtattttgttattatatacatcgcaaaacagtaatctttttttaatttttgttgagacgtctgctatttctgcatccgagaatggtttcttaagaagtatttttgccgcgtacctttttttagaaccatgatggacaggttccacactcttaatgatgtaatcctcgttttcaaggtaaatattatcttttttataaggagtatactctgaaattttaaaataaattgtacctcctatattagctctatatatagcatgctgaggtgtatccggattatttaaagtatgaatctcaagtaacctctttacccacaactgcaaatcataaagtgaaatttctcccttttttattaaaaatttattcgtcagtccatcgcataaaatatttgtaaatatacttccattgctccctccataagaaggttcaatagcgttactaccacttaatatcgcataaccgctaccttgaaaagattctatagattcttctaaattagtgctttttgtaccttcaactctaaaattacctgaatagcagcagtctataagcaatactttgcttttagctaatgactcgcctattttattaattatgtcctgagtacataataaaccatcgctaaaaacaatattatgaatttcactagaagtcccatgacctgagaaataaaaaataaatatatcatctttttgtaaattgccaataaaaagctcaagggcatgtacaaaatcgacgattgctacatgaccgttatttgtcatacccatttgaaaaatatccatatcatccagctgtaatccttctcttaacgctttattaacattaattatgtctgttttacaaaatggtaaatcaggtgcaccgatacctgaataatcactaactcctactataaatgcctttatccttcccatataaatcaccccagcttcacttgtttatctgattaagattgtaataatcatataaatagacaagcccaatttttattaaagaaaattgggcttgtctatattattctggttgttctaatcgtgattgaatgtttttccagtgtttcttcacttgtgtttccataagatttatagtttttgaatcttcatcaaatatcttctgtgctctttcaacgtaactaataaaattcccatgccctttcttactttttcccaagtgagagtagttcttatataattctctcctatacgatttacgaccgaatttttttgatttacgattgcatatccttactttacgatatgctctcgtataatacttaaaaagacttttttctctaattcgaacttctttaccattaaaactgaaccctagatagtctaatattgtctcatttaagtctaaatcgataatctgattatcgttataaaaataattccctgtcttctcaagttgaatttctaaatttggaatctgttcttttatatcttccaaaattttttgatgaatttgatagttatagtcttgaatgcctccttcaataggaataactataattaaatcatcacaatatcttctatatagcccattttgttctttaacatatttttgtatttttttatcaaagtccagcaaataaatattagaacagactgaactgatacccgctccttgaggaattccataccttttagaattcttgtaaatatttttatgcttaaatgctctaaattccttctctgtgaaatatttataactactttcaatttcactttcagtgtattttgtctttaattctgcttctatagtatctttaataaagtaactaaatcttgttatattcttgaagacattataataatcgtcaggtaaggtatccttttttagaacatagcggattttctctttaagatacctatgatccaatgtatcaaagaaattagtaaagtcagcaacaaaaatatatgcactttgctgcacttttataaaatcaataacttctttagcgaagttaatattactttttccagataagttattccgatatgcagttgcaacttcattaatacctagttcatctacaacagaattatagtggttatttagcttgtccccatagtacttatagatatagctatccatatgagacgcatagaaaattttacgaactttttcttttcgctttttttcttttctgctatatttttgaaatttaatttcaaaatgcataaacgggtaaaaaccatgtttagcaacccatcgagggttctggattttactcttaactttttcaattgattttttattatcaaggtgcttataaccctttacacgatactttttttcattcatatttggcagagctagcaggggtatgtaatcgtagcctattactctctatcaaaaaccctgctagcatactctcctttcgaattatagaccattgctagcctataaagaggctactgaatgcactaatagcttatactataatcagtatattaaattggttgtttatgacgattggaggtatccaaatgccaagttattcagaagcgttatcgattgtaatcgactggataagtattatgattacaattgagataaagcttgacagaaattcaccaatttccctcataactacttttatgaggcgttaaccatattaatattaccatctaaaatttaaatagtcaaaaaagtcaatcaaaagtcatgttttgacctaagatctgaaattaggtatcttgaaaaatataaaatatattatgtaaatatatgagttttttatttttagaagtcgatgatcttcaactgatttgggattcaattaatgatactcaactagttttccacccaatataggcatcaaccggatcgattgattatctgaaattagaacattttacgtaggaaaaagaagtttctttaattcttgatagaaacctttttagtagtttattgtctcttgctaaaaatggtgatctaaaagacactacggaaaaaagaatgattgcttttttaatgttatgggctcaattgaatggaggttccaatcagtgctggattagcaataatggaaaatgcatcaagatacaacgattcttgcaatgctaaaatagagctaaataattttaatgatattttcgatttttatccacctcagatttggttaaatttagctcgtggcacaatagaccagattccaaagtgtaactttttcaatattccatatgaaaactcaatcacttatcatgacactaatgatcacttcctaatgaattatgccagcatgttgcatttagttaatatatatcgagactctgacatggctcctttagaaaaattattagaagtcctaagttggaactttgacaatttactcatctctcaatatatcaatagatatcttgttatgttattttccaatcaaaatggtatcaaagcacctaaacacgctaatagcgatttattagaaagaattgaaaaaggttgtatgaatcaagcatgggatttaacctatctatcatgttggagtacactttactggaatgaatcaaaaacgcatgaggtttttttatttgctaccgccgataatctgttaaagaaaatttttattaacacacataatggtagagatttatttaatttaattaatattgcttttcctaaaagaagtgctgataaaatcattcaattctatattgaaaaaacaagaaacagaattttggggataatccaactcaatatttcaaatctttaattgagaaagaaaaaaagcatttgaaacaatctgtgggttgataattttcagctgtattacctaatgtcattccctttgttgtaaattcaaatatacaatacaaactttaatataaccaaaacagtccctcccccatttgttggggaagggactgttttggtatacaggtaaaatctcatctacttatgatacggctccccacgattaatccgaaaagcccgataaatctgctcaactagtatgagacgcatcaactgatgaggaaacgtcatttttgagaacgacagcttctcgtccgctcgcttcatcaccgcgtcgctcaatccgagtgatccgccgatgacgaaggtgactttgctttttccatatgtagccagcttatctattgtatcggctagttcttcggatgttttcatttttccttcgatggcgagggcgatgacgtggacgtcggggctgattttggataggatgcggtcgccttctttgtcttttatgattttcatgtcctggtcgcttaggttttccggcgctttttcgtccgggagttcgatgatgtcgatttttgcgtaggccgaaagtcgtttggtgtattcttcaatgccttgcttgaggtatttttcttttagttttccgattgtcacaatattgatattcacaggtcatccccactttaaaaacaagttattcatatatgttgtccacaattgtggatatcttttctgtattttgtgtaagatcattcgttccccactatatatactgcggggtctccacataattcacaggctgtggataaactgttagtatgttcgatttttctgatttcgggcggcagctcgtggtcgtctatgtacatatccagcaccgtttcgatgtgttcttcacaagaataatacgcttgtttcatgttcaaatcctccgatgttttcttccatttttacaaatgttctcttctcaatataacctatttattcacatgttagtagtgcttcgggctgagttttatccacaattcgacaaacaagctgttgatgactctatttcgctcgtgtgttagtttggatgtaaccgatgtgtgaggaggtctacatttgcgctttagatgggtttggctttttgtgatcatgttgctgcttgctgggtgtcagccgtcttattgggtgttggagaaggatcgaatcggtgaaggcagtccagacttagaaatatacgctaattaccttcaaatgcatgatgatgtaaaaggatatcaagtcttcaccatatcagaaggcaaaaaaatggtcgtcgtgtctctcggaagcagcgagaacgaaaaacagcttgaggtgtcagacgtcaaattctcacctaaagaaacgattgtaactgtgaaacgaaaacctgcttccaaagctaatgagaaaaacccttatattctgattggactcgataaaatcgaaggggatttaattgtccaagacgaaacaggatatcactttgaagaaacagattaccagcaataaagccggcgttctgagaacgtccggctttttcttttacttcaatgtcccatgcgggtcgatgacgaattttttggctgcgcctttgtcgaagtcgctgtagccttttggcgcgtcgtccagagaaatgacggtggcgttgacggcttttgcgatttgcgctctgccgctcaggattgctttcatcaaattgcggttgtatgtcatggcgggtgtttgtcctgtgacgaaggtatgggctttagcccagccgagtccgaagcggatttttagtgagcctgttttagcgtcggcatcctttgcaccgggatcttcggtcacgtataagcctggaatgccaaggctgcctccgacctgggtgacatccatgatcgagttcagcacggcggcgggcgcttctccttgattgccgtgcccagatgcttcaaagccaacacagtccactgcggcatcaacggttggttcacctagtatttgttcaatttgttcgccaaggcggtcgtgtttttgcacgttgaccgtttcacagccgaagcttctcgcctgtgccagtctgtcttcgttcagatcgccgacaatcacggtggaggcgcctaggagctgagcggagtgtgcagctgccaagccgacaggccccgctcccgcgatgtaaacggttgaacctgtttgcacgccagctgtgtaagctccatggaagcctgtcgggaaaatgtcggacagcatggtcaaatcgagaatcttttctagcgcctgttctttatcagggaatactaaaagctgaaaatcagcgtacggcaccatgacgtattcagactggccgccgacccagccgcccatatcgacgtagccgtaagccgatcccggccggtccggattgacattcaggcacacatgcgttttctgcgttttgcacatcacacagcgtccgcaggcaatattgaaaggaacggatacgatatcgccctttttgataaattcaacatcacgccccgtttcaatgacttctcccgtaatttcatgcccaagcaccaagccttctggcgccgttgtgcggcctctgaccatatgctggtcgcttccgcaaatgttggttgtaatgactttgagaataaccccatgctcacattttcgattcacattcgcctttgggacgccgggcccgtccctcaagattaactccggataaccgatatcctccaccgctacagtccctttgcctttgtacacaaccgctttgtttcctgtcaacgccattcctccctttcatgtgtttggacgcttggtccttgaacatgacttcggtttggcatgaccctttccctttctcacgactgttttttctgtattcttataacaacaaatatgccaagaaagcagccaataatggttccgccgatgtctaagaagtcgactttacatccatttaacaggaatacagtaatggccgaaaccaggctgatcataactgccagaagaataacccgtttggtgcgcatgtaattcctcctttagattcgtttctaaaccatacccaaaatcctctgcaaatttcggttcaacaaaaaaagagacttcacaccagtctcttcataattagagatcaattaaaaaatttcctgagaaataatgtgacaatactggttaccaacgcaatcgccgtatacataacaacccaaaacatgaatgagctattacccgaagctaacgtaaataacaatatcaagctcgcgataaggacgatgagcggtgccacccaaaatcttttaaataaaaaatgaccggctataccaaatacacctgcaatgatcggaaaaccaaaaacgataaataaaacggcgatagctcccatactaacctccttgccctaaaaccccttcatcacctcaacatcatacagcttcaaatgactcttcggcgtcacgacatcctttaccttcccaatctctttttctttcattttctttccggttttcagactgtactgttcaatgtaggcaggcttgttatacgtgtatgtgaagtaatagaggctgctgcctttttgggtgatttctttgaaatcggctttcattttgtcctgggaaagggtgaaggcgatgtttgtttttcctgtcttggcatcgattttgtgtacctttccgaagccgtcaatgaaatacaggttcccgtcataagggaaaaagctgtttttaaagctgaagggcatggagctgtatatcgtttgttcgtcgtttttgtattcggcgatgtcgtgcagctctactttgccgctttttttgttgatcttgaccatttgatagagattgcgggctttttggccgcgaaccataacataaacagcttggtcgtccacagcaagctgggattcgactgaggctccttcccggtactgccattccgatatcttgtggtaagtgagcttcttttgatctgcttgaatctgaaggagctcatagcctttttcgtcagctgtcgggacaagtgcgtaaatggcgccatcatggaaaccggaggctcggatgtagtaggggatgacgtcttttttccactctccgtctatttggcggtacagctctgagcggtatccgtctttctttttgtcgtagccggagttgtataaggtgtaaaagccgtccgtgttttgcagaaagcctgcgctgtcgcctgtgtgctgataggttcttttatgagatctcaggccgtctttaatcgtataaatcttgtttttgtcctccagcatcacactgtcgccgtgaaccttggctgatcccagctcaaggcccttcatctgaaatgaagacagcgacccgtcctggctgataaacaaggcatagcttttcccaccgccaaatgcatcttgatccgcagaggttgaaaaatataacaggacttctttgtcatccaagaaaccggagtctcgaagatcctggtgacttacagttttatggctaggagaaatgaagacaaatagtgcgattcctgcgagaatcagcatggcgatggtaatcatccactttttcatatccttctccttagtaaatggtcatgatggttgtcgtatacgaagaacttgtgatgtcgcgcggatacacgcctaagcctccgttgctgtctatatcaatccctgcttttagcaaaaaggcagaccataggagctttgaacagtttttggcgccgtcatggcccgtatttctgttattgacgaagttaaatgagtatgggtcgccgacttttgataccgcccagtcggcagcagctgttttttgagatgaggatacgctgacggtttgcacaatggagttgtcttccacgtctctggcattatacgcgatctgcctgacgccgtcgctcgggacagattcaacaattttgtcagcggcggagtacatgccgacgtggccatgattgtagtaggctgtgtaggagttcgtgtaatagatattgcctttcgcgcttgtcgggagttttttcgtgccggacgacccgcccatgatagacatgccgctttccttggcgagccggtctccttctgctttatcagccgtgatttccttatagaactgttttaggataacgtcctgctttacgtgctgctgtttggcaatctggctggcagatttcatgatttcttccggtgtcgtgcctggctgcagtgcggcgatttcttcagcataatttgtgttctttacggctttggcgggagaaacgaacaggccgccacacattgtaagcgctaccaaaaacatcgacactcgtttcttcaacttcattacatctcctcttttcttgtgagtgtaggaaagggaatttcctcacccacattatattaggaaaataaggaaagtaactaggttatttacagaatttttagaaatcgtttacagaaaaaggcctttatcaggcccttttcgttaaatcttcttgctcatcactacgtctgtttcttgaaatccggtttgctcatatagctttcgcgccgtctgattatgggcaaagacatgaagggacagcttgcggattcccatgctgcgtgccgtttgatctaatgccgccaatgcttgctttgcgtagccctttccccgatacggttcatataacccgaaatcataaataaacgcttcctgctgcggatgctccggttcagcatgtatccagagccagccaacgatatccttttcattcagcttgaggctccacaaatggtgatggggtgtttccagccctctcggaagcagatcagtaaacgcctgcttagacaaaagctgtgcatcttcaggcagccatgttcccgcttttaccttttcttccgcgtaatgctttgttgtgtacgtgagataagaccgaaattcttctgtctgcattggggtcagcatgattgtcatatcatctctccttcatatattgactagaggattttacataaaatagaaagaggtgttactatcagaataagcaactgagattgataagtcactagagaaaggagtttcacatgaataagatcgcacccgcagaaatcgctagcatgctcaacgattggtaccttgccatcaagaaacatgaagttgaagaatcctcccgtttatttgaagaagtgaagcctttattggacgacatggaagaggatcaggaggtgctggcctacttctccttattggaactgcgccacaaggttttgcttcacgaggcgagaggacagggctttcagcatgaggagccttctcatatgaatgctacgtctgacatgctgaaatattacttttttctgtttgaaggcatgtatgaggcctataaaaataattatgacattgccattgggctgtataaagatgcagagcagtatctcgacaacattcccgatccgattgaaaaagccgaatttcacctgaaggtcggaaagctctattataagctgggacaaaatattgtatccctcaatcatacacggcaagcggtcaaaacgttcagggaagaaactgattataaaaagaagctggcttcagccctgattaccatgtcaggcaattttacagagatgagccagtttgaagaagctgaggcttacttggacgaagcaattcggatcacgagtgaattagaggatcatttttttgaagcccagcttttgcataacttcggccttcttcatgcgcaaagcggcaaatcagaagaagcggtttcgaaattagaagaggccttacagaacgaagagtatgcccgctccgcctattattatcattctgcctacctgctgatacgagagctgtttaagatcaaaaagaaagaacaggccttatcttattaccaagacgtgaaggaaaaattgactgctgagccgaatagaatatgtgaggcaaaaatagacattttatatgccatttatgcagaaggaggtcatgcggaaacgtttcacttatgcaaacaacatatggatgacttgttgtccgagaaagagtatgacagtgtaagagaactttccattttggctggcgaacggtatagggaacttgagctttacaaagaagctgcccactttttttatgaagcattacagattgaagaactgattaaacgaacggaggttatataaatgaaaagatttctgattggcgcaggcgtcgcagcggtaattttatcaggttggtttattgcagaccatcaaacccattcacaggaaatgaaagtcgctgagaaaatgattggataaatgaaaaacccccgcgggtgcgggggttcaatttaacgaaagaatcctaaaacggtttgtagttttaggattctttcatcttttcagcgtgattgaaaacccttgaagtctaggaagaacgagcattggagcgcagcgaatgtttggaattcgtgagcaccgaagcgcaggcctgacaacgaatgcgagggtttgtcgacacgctgaaacccccgcgggtgcgggggttttcttattacagcagcttcttccctagcagagattctacgagctctactgctgttttacccgttttgtttttgtgatcaaggatcgggttaacctcaacgaattcggctgaggtaatgatgcctgcgtcatacagcatttccatagccaaatggctctcccggtagctgatgccgccgacgacaggggttccgacacccggtgcgtcgttcggatcaagtccgtccagatcaaggctcagatggacgccatcacatgctgataaataatcaagggtttcttcaatgacctttgtcatgccaagacggtcgatttcgtgcattgtgtacaccttcatgccgctttccttaatgtacttgcgctccccttcatcaagtgaccgggcgccaatgatgacgacgttttccggtttgattttaggcgcgtagccttcaaggttaaccagtgactcgtggccaatgccgaggctgaccgcgagcggcatgccgtgaatattgcccgatggtgaagtttcaagtgtattcaaatcgccgtgcgcgtcataccagatgacgccgagattatcgtaatgcttcgctgtgcctgcaagcgtgccgatcgcaatactgtggtcaccgcccaggacaagcgggaattttttctcttcaatgactttgttgaccttttgcgcgagtttttcatttcccgccaaaacggaattcaggtttttcagttcctcgtcatttttgattttttcgcggttgatcggaatgtcaccgagatcctcaaccgtataccccatgtctgacagccgctcgatcagatgagcgtaccggatggcactcgggcccatatctactccgcgtcgtgcttgtcctaaatccattggcattccaataaccgaaatcgttttatccatctgtgattccacctcaacatttaagataatgtcctatgcgggttctaacaaagatgacttacggacaacgttttaaagctctagctgacgattcgcctgctggcgttttttaatgacgacatgataaatgatgtagcaaatgatcataaacggtacgccgcaatacagcgcgatacgctgctccggatcaaatgcgagactgatgagcacgaccgtatttaacgttagaccgatcagcggaagcaccgggtacagcggtgttttaaatttcaaatcttctatcttcccgccttcgcggatatatttgcgtctgaacatgatttgggaaagcgaaatcgtaatccagccgacctgtgcgctcatacccgccaaagataacagtaccatatagacagtttcagcctgcgcaaactttgtcagaagtgataggcaggccacagccatcgttacgattaacgagtacatcggtacaccgcgctgatttgtttttccgagcgctttgaaggcctgtccttcattggccattgcgtacagaatacgcgttgatgcgtataaacctgagttcgcaacagataacagtgcgattaaaataacaaagttcatgatatcagctgcatatgggattccgatttgctcaaatacggcaacaaatggactttccacgacacccgcctgtttccacggaatcatgccggcaatgacaatgattgaaagcacaaagaagacaagcgttctccatactgtctgtttgattgaccgtggaatcgttttttcagggtcttcactttctccggctgcaaccccgatcagctcagtcccctgaaacgcaaagttcacagtaatcatcgtaatcagcattgcctttatgccgttcggaaataacccgtcttcataaaaatgtgtcaaaaacggcgcctgctctccgcccttcagatcaatcaggccaaacatggcagctccgccgagaataataaataaaaggataatcaaaattttaatgcctgaaaaccagaattctgattctgcaaaggcttttgtggtgattgcatttaaaataaacatcagtgccgcaaagaccagacaccaaatccacacgtctatatgcggaaaccagcgttgcatcagctgccccgctgataaaaattcaatggcgcatgtaaccgcccagccgagccagtacagccagccgaacgcaaacccgaaggccgggctgataaattttgtcgcataggtctggaaggatcccgacacaggaaaggcgactgccagctctcctaagcagagcatcgtcaaaaacatgataaagccgcccactaaataggacagaaccgcgccgagcggtcccgcttggttaatggtaaacccggttccaaggaagaaaccggttccgatcactccgcccaatgaaatcatgaacaagtggcgcgatttcattgtccgctggagctgatttccgttatcttggtttgtattcacattctgcaccccttcagcaacttgtattggatctaagctggaacatctgcatggtgctatcccagtttgctgtccaaagagcctctatctatttaatataaaattcacttcttctcataaagatacattatactaaaatactgtagctgagcaaatagggagtgctgatttttctgttgtaaatttatacaaacgaagtgaatatcccgccatggtgcggatttatgcgttttgcagcacgtgcttaattttctctatcgcccaatccaaatcctctttggaaatgattaatggcggtgcaaaacgaatgactgtatcatgcgtttccttgcataaaagcccttcttccttcaaacgctcacaatacggacgtgccgcttcagtcaattccacaccgataaacagccctctgccgcgaacttctttaataaccgggttgtcaatgctctcaagctcgcttttaaagtattcgccaagctcaagagaacgatccgccagcttttcatcctccagcacttctaatgaagcgatagacactgcacatgcaagcgggtttccgccaaatgttgagccgtgtgagccagggttaaacacgcctaggatctcgcggtccgccgcaatgcatgagatcgggaacacaccgccgccaagcgctttgcccaagatatacatatccggaacaatgccgtcccagtcacaggcaaatgtcttgcctgtacgtccgagacccgtttgaatttcatccgcaataaacaagacattctcttccttacaaatcgccgccgcttcctgtaaaaatccttccggcggaatcacaatgcccgcttcgccttgaatcggttcaaacaagaatgccgctgtattcggcgtaatggcctgtcgaagcgcttccacatcgccgtaaggaatgagtttgattcccggaagcatcgggccgaatcctcgtttatattcctcttcagaagagagagataccgccagcatcgtgcggccgtggaagttcccgacacatgcgataatttccgcttgattgtcagctacgcccttcacttcatacgcccagcgtctcgccgctttcaccgcagattcaaccgcttcggctcctgtattcatcggcagaatcatctctttgcctgtcagtttggctgttttttcgtaaaacggcccaagctgatcgttatgaaacgcgcgtgacgtgagggtgattttatcagcctgatcctttaatgcctgaatgattttcgggtgtctgtgcccctggtttaccgcagaataagcactcagcatatccatatattcattgccttccgggtcctttacccaagcacccagcgcttcagaaataacaatcgggagcggatgataattgttggctccgtaatgagacgtctgatcaataatttctttggatttagataaagctggcatatttgaattcccccttgttttctgtttcaacatgttatcctgctttccctttatataaatgcaagttctgtgccaaatcaagaattcgtgtgttttctacaattttcgaggacaaggtgcaaaaacattctgatatttcgagcaaaaatttcagcaagtgcaaaattcttttgcataccctctccatttttttataaaatagaagcaatattaagaaaactgagggaggttcatacagtggtcaaagacagcgaattcctcacattggtttttcagagcattttagatgaaatcgatgttggcctgcacgtggtagacgagcatggaaacacaatcgtatataacaataaaatgatgcagattgaagatatggagaagcatgacgtcttgaataaaaacctgatggatgtgtttatgttttcaaagcagcaggacagcacactggtacaggctcttcaggaaggaaagacgattaaaaacgtcaaacagagctatttcaataataaaggccaggaaattacgacgatcaatcatacatatcccatcgtccaagacggcaaaatcaggggcgccgttgaaattgccaaggatgtgacaaagcttgaacggctgatcagggagaatatgaacaaaaaaggcagcacaacctatacgtttgacagtattctcggcaccagtccggccattcaagacgtcatcgaaaacgccaagcgggcaacccgtacgtcatcatctgtccttctcgcaggcgaaaccggcacaggaaaagaactgttcgcgcaaagtatccataatggaagcgatcgttctggcggcccgtttatttcgcaaaactgtgcggcattgccagacagccttgtggaaagcattttgtttgggacgaaaaaaggcgcgtttaccggcgctgtcgaccagcccggcctgtttgaacaagcccacggcgggacgctgctgttagatgaaatcaactcgctgaatctcagccttcaggcgaagctgctgcgcgcccttcaagaacggaaaatcaggcgcatcggttcgacaaaggatacaccgattgacgtacgtattattgccacgatgaatgaagacccaattgatgcaattgcaggcgaacgaatgcggaaggacttgtattacaggctgagtgtcgtcacactgatcatcccgccgctacgggagcgaaaagaagacattttgcttctcgcgtcggagttcatccagaaaaacaaccatctgttccaaatgaatgttgaacacatcagcgatgacgtgaagcaatttttcctttcttatgactggccgggaaatattcgcgagcttgagcatatgatcgaaggcgcaatgaatttcatgacggacgagcaaacgattacggcttcccatctgccctatcaataccgaatgaaaatcaagccggctgacattccagagcctgaaacaccaagacaccagccggccgcggacttaaaagaaaaaatggaaagcttcgaaaaatatgtgatagagaatgtgttaagaaaacacggccataacatctcgaaagctgctcaggagcttggcatcagcagacaaagcctccaatatcggctgaagaaattttctcactcgtctaacgaataatccggagcaggaagcctgatcagaaaaacagtgcctctgccgatttcacttttcacttcaatcgtcccattgtgattgtcgataatcgatttcgttatggcaaggcctaatcccgaacctccatatttccgggagcgggatgggtctgccctgtaaaatcggttaaataaatgcggcaaatgctccggcgcgatgcctgtgccattgtctgctatcatcagcatcacgccggaactgcctttttgcagagaaatagtgatggcaccggttctctcatttgtatactgcaccgcgttataaaccaaattcagaatgacctgtttcatcttatcccggtcaaacaccgctttagcatcatcctcaagcagcagctgcagccttctttcttttgcaagcagactgagctgcggctccatttcccttatgagcgcatcgagatttcctctcttcatttcaaagctcggcacccgatcaatttttgctaaaaacaacagatcctctatcagccgagtggctctcttcgactcttcatacatactattcagcgccctatctctctgctccggctgaagcgcggcgccacgcagcagcacttcgataaagccgtgtatggacgttaaaggcgttctcaattcatgtgaagcgtctgatacaaattgccggatgcgctccttcgcctctttttctgctttaaatgacgtttcaatccgctccagcatgcgattaaacgaaatagcgagcgtgtcgatttccatttgttttcgatatacaggaagccttttattcaaatttcctgcattgatttctcccatcatatgtaccatttgtgataacggtttaagcgtatgtctgaccacaggcaagaacgtgaaaagcccgagcaggagcgcaaccagcgagagcgtggaataaatgctgatttgccggagcagtacgtccttcagtggttctgttaaagtactcatttggatcacgcctgcttcttttccatcaatagtaatagcctgaaacacaatcagcacttcctcgccggattcatttttcgtgattttgtaatgcaaggccatcgtatcttttaatgcctcatcatatacactttttttcactgttggcggtgctcccgcatatggatcggtcgacaataccgtactgtcttttgttttcttatcgataaaaacaatggtcacgcccggatagataaaggcgggacggacagcaccatctgacttttccgagctgtcgggatggcttttgtatgttttaatattattccagatggttggctccgttgagttgatataactttgaatgctgacagctcggttttcatataagaggcgttttccaaacacatattgcatagcgccgacaaacaccaatagaagaacgagaatgcataatgaacggaataaaagctgaaagcgcagtgttttgaatcgttttttcattcaatatccacccgatagcccgcaccccgaaccgttcggatcacttcatgctttttgtcattcaatttttcccgcaaggaacgaatgtacacttcaacaatattctcttctccgtaaaaatcatacccccatactttatccagaatccttgctttactgagcacaaggccgtgattcagcaccaaaaactttaaaagctcgtattctgttgctgaaagcttgagcacctcttcctgatagcggatttctctgcgccgatcatcaattcgaaacggaccgagcgcgaattcttcaaacaggttgggaaagtgatcccgaattctcgcatagattcgcgccagcagctcttcaaagctgaagggtttgatcatataatcatcagcgccctctgtcagcgcttttacccgaacccccacctcatccttggccgtaagcataataaccgcggtatggccggtttttttcatcatcctcgatacttccagtccatccattccgggcatcatcacatccaagatggccacatgcggctgaaatgtctttacggtgttcatcgctgtcattccgtcagctgctgtcttcacttcaaagccttcattttcaagacccattgtcaaaaaatctaatatcgccggttcatcgtccacgagcaaaatcttgatgcctttcatcctattcatgctgtgctctctccttagttggcataaacctctgattagttttttcccttcccctcctattattcgtttttacctgaaaacaaactgaatcttccctaaaaatcagctgaattcagcaagttttcagccagccctcatttgattttcagcttcggcctatacaattgccttagttggtacagccaacaatgaaataaaggaggaatctcacatgaatatcactaaagttttatcaggagctgcactgggaacgattatttcaatcagttctttcacttctgctcacgccgctgtcattcaaaaggatgatacatcaacgaaggttgagacgaagcaacaggcttccatcacaatagcaaaggcaaaacaggttgctttgaacaaatgcaaaggtactgttcaatcagcccaaatgaagaaagtgaatggcacatacgtatatgttgtgaaagttctcggtgaggacgacaaacagcatacgatgaacgtcaactgcaacagcggcaaagttgtgaaacatgatgttcaaaagaaacaaagctatatcagcaaaacaaaagcccaatcgatcgctttgaaaaactgcaaaggtgcggttcaatcttctgagctgaagcaagaaaacggtgtttacgtttacgtcgtaaaagtaatgggtgaagacggaagccttcacacgttccatatcaatggagaaaacagcaaagtcgcaaaacacgagcaaaagaagcaagcacatctttctaaaacaaaagcgcatcaaatcgcactcaacaaatgcaaaggcgcagttcaatcttctgaactgaagaaagaaaacggcgcatacatctacgttgtcaaagtgcttggcgaagatggaagcactcatataatccatgtcaactgtgacagtggtaaaatcgtaaaacaagaagtgcaaaagaaaaacgcagccgttacaaaaacaaaagcacatcaaattgcactaaataaatgcaaaggcacagtgaaatctactgatttgaagaaagaaaacggcacattcgtttacgtgattaaaatcactgcccaaaaccacactgaacaaacagtgaaagtgaatgctgaaaacggaagcatttgcaaataaaataaactgcctgccagcagtaaaataactgaaattcaacgtataacaccagtcttgttttaacacaaagttctaagttcatgtctacctttttctaaatactcttttaaactgaacgtgcgtgacccgcgttcagttctttttctaaggaggacctacaaatgaatatgaaaatatgttctgcagctgctttaggagcgatcatttcaatcagttctttatcatccgcacacgcggctgttctgcataaagaagacactgctaaagttcaaacccagcagcaggcttctattacgctctctaaagcaaaaactgtcgctttaaagaactgcaaaggcgcagttcaatcagcacaaatgaagaaagcagatggcgtttatgtctatgtcattaaagtgcttggtgaggatggcaaaattcacacctttaacattaaccgcaacagcggaaaaatcgtcaagcatcacgttgaacataaacaagccgcgatcacaaaagcaaaagcacaaagcattgcgttgaacaaatgcaaaggtactgtcacatcttctgcattaaagaaagaaaatggcacctatgtgtacatcatcaccatcacagccagcaaccacacggtacaaaccattaaagtgaatgctgagaatggaggtatttgcagttaacagccatttgctgctgtttcacgtgtaacatccatcttgtatttttcttcatattcgatatatccttttcaactgaacgggcgtgacccccgttcagtttttttgcatatcaaaacagcctggcaaacgatgccagactgttttgattaacttcctaattggtctgcggaggacagcttgatgtctacagatttttcttttccgccgcggtaaaacttcaccttcacccggtcaccgacttttttctgataaagccgttttcgcaggtcaacaatatcatttactttgtatccgtcaaatcccgtgatgacatccagttccttcagccccgcttttccggcaggtgaaaaggcgtctacacccatcacaaccgctccattggtaacatgcttaggaagctttaatgtttcatcccaatgatagcttgcgatgtcgcttagcgatttcatctcaatcccaaggaacgggcgtttgacctttccgtatctctctaaatcctctatcacagggatcacgagcttagatggaatcgacaggccaatcccttcaaccgccgactcggcaattttcattgaattgatgccaatgaccttcccatccatatttaacaaagcaccgccgctgttcccagggttaatggccgcatctgtttgcaggacttctgcgttccagtcaggctgtccatcaccgtttgaatctactgggatcgccctctccgtacccgagatgacgccttgtgtgacagagccagcaaactcaaggcctaacgggttcccgatcgcaataaccggctccccagacttcactttatctgaatttccgaaatcggcgactgctttaattttatcgcttttcacccgtaaaacggccagatccatcagctggtcgctgccgacaagatcagctgatacacgtgagccgtctttcaagctgatttcaatttgggaagcgccttcgatgacatgatggttggtcacgacataagcggaatggtcatttttcttatagatgacgccagagccgctcccagcctcgccgctctctccccgtatatctgatttttggatgttcacaacaccgacaacggcgggcgacacattgctgacaatcttggtgaccgtattgttgacactgacattcaccgtcctgattgattcccggccgttattgttctgctgctgatctaaagcgcccgtatctagcccttcatttgaaaggtacggcatgataaacgccattaatacggcaccgacaatcacgccaatcaggcttgaaagaaaatatccttttttgcttctctttggctgttcaggagtagtatgttcttcctcacgttcgtaatccaccatattccatcctttccaagaacgttaatatggttatattgtgggttagaagctcctagaatagtcatgatttacatagaaaaattatacagcgcaaagcggagtggccttcttcggatcagtgtcgtataagtcaaatgtctcacccgtcacaaatcctttagaagccaatgtctgctgcacggacattcttgccagctccttcatgttgttgtcctggctcaaatgcgccaggtaaatacgagacgtctcatcgccaatgacatccgtcatcgccaaggcagcatcttcatttgaaacgtgcccgacgtcacttaaaatccgccgcttaatgctccatgggtatcttcccatttgcagcataccgacatcgtgattgctttcaaacacaaacacattcgctgaacggataatgcctttcattcggtcgctgacatatcccgtatctgtcattaacgcgagctttcggccgttataatggaacacataaaacatcggttccgccgcatcgtgggagacgccaaacgattcaacatcaagtccgccgaacgacttcaccgtctccatcggaaatacaaacttttgatcggtgtcaattttgccgatttgattctccatcgctttccaagtcttctcattcgcatagatcggaagcttgtactttctggcgacgacaccaaggcccttaatatggtcactatgctcatgcgtcacaaaaatgccgtctacatcatccagcttacgcccgatctgcgccatcagcccatccatggcttttccgctcaaaccggcgtccactaaaaatgcgtgatcctctgtttcgaggtaaaacgcatttcccgtactcccgctcgcaagtacgctaaattgcaagctcatgtttgtctcactccattattttcattgatctgtatctaaaatcgtactctccaaagcattcacagtaaaatactcttgtactgtctttttctcaccgttcacttttttctcgtactcgaccgtaattctccataccggcgccagcacctgcgtacttgtcagtggatattgtgctacatagccgaatttacagctcttcacagtgctgtattcttttaattgattttgatagtacaatagctcaaccgcatccatttcagtaattaagctttctttctggatttgcttgaaggtctcaagcgttgtctggtcgtacgacacaacctcgtttttaccgtttaagtgcaataccacttgcccgatcatattagcgggattatcggtcttttggtaaatataatggccttcgtacgtttggaagaaaataatttctttcttcgatttattaaccttccaaagcttatatttttcgccatcttgaatctttgaagaaacaagtgcctgagcatcgtcctcgatatccttctttgatagggctattggatttgcaaacttcattttcaggctcgttactttatgatcatcactaggcatgtccatcaaaggcttttgatccttcagcgcctcaatttcctccttggtgaaggctttttgatttgccgtgatccgatagccttctgtcgcttccttattcaagccttcatacgtgatatgatcggccttcatgtcatgctcgacatcatttttaatgacttcatattctttgccggtagcctgccatttttgaaaaaactgatagcctaagaaaatatctaaaatgaggaaggcaacgatgaagattgattttgtcttattccactccactgttagccccctccttcctcaataaatcctttgtaatcggcacaatttttccatttactttcatcgcccaaaccggttccagttcaacgagaggatcatcgttggttgatgttgataccaattgataagcaaggaagatctgatcaattttgtccgtatcataagcggtttgtttcgaaagcagcatcctcacttcgctgccgctcatgagctctgtttcacttgttttaatcggattcgttccgagactgtaattcggccgcttatagctgagaatatcatcattcgcccattgcaccgtaatcgccgatgtcgccccgaaaggtttggtggtgctgttaatgaccgggatctgatccataaagatatagaaactcagctgctggctgtcattgatactgaaaaattgatagtgatccgtccagcttccggtatcctcaaggtatttttggctctttttgattaattcacctgtttgataggatgtgctctgcaccaaattgcgctgttgaaattgcacctgtcgctggcttagattcacatctaaacggctgatcccatctgtcagcacatttctgttgttgtaattcgaatcttctcttacaatgctcggatcactaaacaaagcctgcttaaaggtatttgttttaatcgattctgtgacaaattcttttttgtccatcgtaagcggtttgttcggcagcaagaactctttctttgagccaatggagaacaaactgaacgccggcatatttgattgcctgtttttcaagtcgttcataatgttccggtagtttgctgactcaaccgtcacttcaagaatgagctgtttgctgtaagacaccaaatagattttcttgttcgcttttgtttcattgaacgggatcagaatatggtcaaacgaactgtattcaaacgactgattagaccatttaaacagcgtttggaaaatatcaatcggaatcgtatcgctgaattgcaagtcaagcttggcttcagaaccgcctattccataaaaccagcttttgaatccagccttgtcatactgatccgaaatatctttaattcctttcacatcccaatgtggcaagtcagaccaaatttcttcatagagggcattgtcatccactttgtaatgagcgccgtcatcatggataaacatgtcccttggccttaccgtttcagacagcttttgagtggttttttcgattttatgtttcacacgaacagtagactctgttgaggatgagccttcagaaaagtttggctggaacgtccatatcccccatgtaaaaacaagactgatgacgacgagtaccgtaagtaatatcgtttttatattttcacgcttcatcccaatcatcctcttgttcctctttatatggaagagtaaatgtaatcgtcgtgccttttccttctatgctgtccgcccaaatatctccgccgtgcgcctgtaccatttccttggcaatcgccaatcccagaccggtgccgccaagttttctcgttctcgctttatccaccctgtagaagcggtcaaagactttttcgacatcttttttcggaatgccgatcccttcatccttcacgctgatatagagaagttcttcctcttcattgacatcaatcgagaacgtgacatgtccgccttccggtgaatattttaaagcgttagaaataatattatcgagcacctgcgtaattttatcctggtcgatctcgacgtacagatctctgtccggcagattgcggataaactccacatgctgctcttttgtcatttcaaaacggtcaataataagcgacataaaccggacaatctgaatccattcccggttaaattgataatccttactgtcaaatttcgacagctgaagcagatcattgacaagccggatcatacgctctgtttcattttgtgtcaccattaagaagcgcggagcaatgtctttattttcccacgcgccttcagctaacgcttctaaatagctgcgcattgtcgtaagcggcgtccgcagctcatgtgatacattcgcaacgaattctctgcgttcctgatccattttctcttgttcggttacatcgtaaatgacagcgattaaaccatcaattttgccgtgttccctttgaatcacagagaaattcacgcgaagcaccgttaattcatcatcgcgctcaatttcaagcagcatagaatcctgctgctccactaaatcttcaaaagtataattctcttgaagccccagcaaactcgtaatcggcatttctaaggctgtttcacgtgaaacgttcaacagctccagcgccgggctgtttaagagaataatcgctccatttcggtttgtagcgattacgccgtctgtcatataggcaatgacagaggctagctttctgcgttctccttcagtcatcgcctgggcatcttcaagctctctcgttaagtggttaaacgttgtggccagctgcccaatttcatcatgcccgtactttttaaccttcctcgagaaattccctttcgcaagctccatcgcctgctttcgcatatctgaaagcggatgggtaatggttcttgccagaaaaataccgagaagagccgtcaaaacaagtgccaaacctgtgccggacgccaatatcgtgttgatcgtcttcatttgattaaagacatcttccatactcgcgacaacatagatcgcgccgacaacctcttggttttcagtcatgacgggcttcgcggaaataagaactctgattttgcttttcgggtcataatattttcttaaatacgactgtttggtagaaaaaattcttttgaaaatcagatcggtcgtttgtttccctgccacttcctcaccatacggctttgaagaaccgaccacttcatagcttttatctacaaagctaatttcccgaacctcatcacttttcgtgaagtcattcaaaatacggctgacgtcatcctttatgacggtgctgtcgttatcgctcttatattcttgttcgatataataagaaaggttgtcgattcgctgattcagcgattgttcataagagctgatcagcgacttctctacctgattgacaaaatacacaccaatgatttgcatggcaatgataatcaaaagtacataaatcaaggtaatcttaaattggatcgaccgaaaaaaaccaaccttattcatatggtcattagtcctgttctgggtttctcaagtaataacctacaccgcggcgtgtgacgatccaatttggatggctcgggttgtcctcgattttttcacgaagccggcggactgttacgtcaaccgttctgacatcgccgaagtaatcatagccccaaacggtttgaagcaaatgttcacgagtcatcacttgtccgatatgttttgctaaataatgaagcaattcgaactcacgatgagtcaattcgattgtttcgtctcgttttgatacaacgtacgcgtcagggaagatgacgagagagccgatatgaatctcgttagaggaaggctcttcctccgcaggcgctgttgtcagctggcggcgcaggttcgcttttacacgtgccaagagctcgcgtgtgctgaatggttttgtgacatagtcatcagcaccgatttcaagcccgataaccttgtcaatttctgaatccttagccgtcagcataatgattggcatatcgtatttctttctgacttcacggcatacttcaacgccgtctttattcgggagcataatatctaaaagaattaaatcaggctgaagctcttctaccatttcaacggcttcgtttccgtcgtgggcacagtgcacttcatagccttcttttcttaagttaaattccaatatatctgcaatcggtttttcatcatctactacaaggatctttttatccatcattttgattttcctcctgccgaatgacttcatttcatctatataacattcgtttcatcacttatggcccatgtaaagaatgggtccttgtctattataacggtttaaggtcaaaagataaaaaaaataaaggtttagaaaaaaaacacatgtttcacctttatcgccagttgtttatctattgtcatgctggtcaactttttttaaaaaagataactttattgaaacctcccttcaccggagtgcgtctttatcaatgacgtcttcttctttgaaccggccgcagggccggttctccctttttcttctattataacactcctcatgtttgcctttttcctaaaagaaaaaacgcacctacgattgcagatgcgtttggtaagtggctcgggacggaatcgaaccgccgacacacggattttcagtccgttgctctaccaactgagctaccgagccaaatgttttatttttctctactaagtaaagtaaaatggcggtccggacgggactcgaacccgcgacctcctgcgtgacaggcaggcattctaaccaactgaactaccggaccttacagtaattgcccggagagctgtcgtgtcagctctcacagacaaataaggaatttagcaataacgctaaagtaaatcaatgacccgtacgggattcgaacccgtgttaccgccgtgaaagggcggtgtcttaaccgcttgaccaacgggccttcacgaaatggtgagccatgaaggactcgaaccttcgaccctctgattaaaagtcagatgctctaccaactgagctaatggctcttaaagatgtcggaatttctatagagcaaacgacttagatctagttctcatcttgtactctattgaagcagtttccgtaacaacgagatttataatatcacgaacaaatagaagtggcaataacttttttggttttttttcatatttttttctcagaccaacttatatgcagctttcaaacaaaaaacaagccccttatataggggcttgcagacatattctatttagttcgcacggtacacactgcgaaggacatttgtttgtgagcggtctggaccgacagagaaaatagaaagcggaatgcctgtcagctgagacacacgctcaagataatggcgcgcattctccggaagctcgctcaagctcttcgcacctgtaatatcctcagtccagcccggcatttcttcatataccggctcacattcagcaagtgccttaagacttgctgggaattcttcaatgatttcgcctttatagcggtacgccacacagattttcaacgtttcaattcctgttaggacgtcaattgagttcagagaaagatctgtaattccactcacacggcgggcgtggcggacaacaacgctgtcaaaccagccgacacggcgcgggcggcctgttgttgttccatattcgcgtccgacttcacggatttgatcgccgatttcatctttcagctcagtcgggaaaggaccgtcgccgacacgagtcgtatatgcttttgatacaccgacaacgtgcttgattttggtcgggccgacaccagaaccgatcgtgacaccgccggcaaccgggttagatgacgtaacaaacgggtatgttccttggtcgatatcgagcataaccccttgtgcgccttcaaataatacacggcgcccttcatcaagagcatcgtttaagacaacagatgtatcgcaaacatactttttaatctgctgtccgtactcataatattcgtctaagatatcctcaagtttaaacccttctgtctcgtacattttctcgagaagacggtttttttcttcaagattgcgctcaagcttttccgcaaacgcgtcacggtctaacagatccgcgatgcgaattccgatgcgggctgctttatccatgtaagcagggccgattccttttttcgttgtgccgatcttgttagcccctttacgctcttcttccacttcatccaatttcaaatgatacggcaaaatgacgtgagctctgttgctgattctcaggttatctgtactcacgttgcgctcatgaagatacgcaagctctgtgactaatgctttcggatctacaaccattccgtttccgattacacacgttttatccttatagaaaattccagacgggattaagtgaagcttatatgtgattccgtcaaacttgattgtatgccctgcgttatttccgccttgataacgggcgatcacttctgcattttctgataggaaatctgtaattttaccttttccttcatcgccccattgcgtacctactacaactactgaagacatgtccgtgcacctccgttaacctttcaaaacgattctattcaaacaaatcaagtttatcagtgaagaaacagaaagtcaattgtaaatccgaacattaaattattgtaaatctatattcgttcgctttcattcgttttataagcgttttctcacggttttgtcataaaaagcttgcgaaactttcatcctttagcataagaaagaatcacttgcctgatatcccttttgaattcataaaaacgacccgccagccgtccgggtcctctatcgtcactcccccattgctccagtacgggttctctgattcgacctcttgatagcccatgtgctttagctttgaagtgatcgctgccagttcatctgcattcggcacataaaaaacaagaaggctgtcgggatggggaacgggggcagtgcttccaccttcatactgggtgaattccaaatgataatcggcatgaggaaggccgaacatgacaccgtcatacccgttatgctgtgaaaattctcctattcgtttcaaacacagtccctcttcgtaaaaacgaataatctcatcaagctggcccgtaggacgcgcaattcggatttgtgctgcgtgaaaagacgaaaaacgtttttccatattgttaccatctcctttttgcaccattttattaaaacgctttcagattttcatccgctgagcgaacggtatttcttccatctttcgaatgaaaaaaaccccaagagcagctcttggggcttatgcgccgggcggaactcctgcgtcatcaaaacgccgttccaggttgacgaatttgttgtattcttttacgaacgcaagagacacggttcctaccgggccgttacgctgtttggcgataataatttcgataatatttttattctcggtttctttgtcatagtagtcatcacgataaaggaacgcgacaatatccgcgtcctgctcgatacttcctgattcccggatatcagacatcatcggacgtttatcctgacgctgctcaacacccctggaaagctgagaaagcgcgataacagggacttgcagctccctggcaatcgacttcagttcacgggaaatttcagatacttcctgctgacggttgtcctttgaacgaccgcttccctgaatcaattgcaggtaatcgatcaaaatcatgcccagcccgctttcctgcttcaagcggcggcacttggcacggatttcactcactcgaatacccggtgtatcgtcgatgtaaatcccgctgttcgacaggcttcccattgccatcgtcagcttgccccaatcctcttcggtcaggttacctgtacggagattctgggcattgatatttccctcggcacagagcatacgcataacgagctgctctgcacccatctcaagactgaaaattgctacgctctcatcggtctttgtcgccacgttttgtgcgatgttcagggcaaaggctgttttccctactgacggacgggcagccacaatgatcaagtcgttgcgctggaaacccgcagtcatccggtcaagctccgtaaaccctgttggaattcccgtgatatcaccttttcgattgtgaagctgttcgatattatcataggtctggacaaggacgtccttaatattttggaaggcactcgtgtttttgcgctgtgccacttccataatcgttttttccgcttcactgagtaaatcctcgacctcatcctcacgggtatacccgtcttgagcaatcgttgtcgcagttctgattaatcggcgaagaatcgatttttcctcaacgattttcgcgtaatattctatgttagccgctgtcggcaccgagtttgcgatatctgtcaaatatgaaatgccgcctacttcttccagcaggtctgtgttcgcaagctctgatgttactgtcaccagatcaaccggttcacctcggtcaccgagcaccagcatcgcattatagattttttggtgggacattctatagaaatcatctggaatcaatacttctgaagccagtgttaaagcagacggctgtaaaaaaatagcgcctaacacggcttgttcggcttctatattttgcggaggaagccggtcattcagaaggtctgtcatgctaagcaccgtcctctcattaaaaaatctccaacctccattctaccatttctacagaaaaaaaatagaaaaattgtctgtttcctgtttttttcagttagcagattggatcgtttcggacagtaacaaggcgggaaaaatgcaataaaacatgagggaggaatgaaagatgataaagaaatatgcgattacgcctaatgttgatgcggacggctggtttattgaggtggagaatgtagcgccgacagctttgtatacgtctaaagacgccgctattgaaaaggccaaacaggtggctaaggaaaacagtccgtctaagcttgtaatttatgaccagtttaaaaatgtggaagaagaacactcattttaatgaatgaaagccttcgctgcagcgagggttttttagcggttatcggtttatttcatccattggatgcctatgtgcatcatcaaatctgccgctttttgatacagatcccactccccgatcgaagcaaatttccccatcagctcccgaagctttagcctcactgctatatattcttcgaaagtgacagctttttcagtgtctatttggtgttccttcagcatttgttttaataaagacaacggtgcgtgcataagaaccctccttacctcttttataacggtcattttccgattgctctattcctttgtgacatcttcttacatttcacatctgattcttgtacaatggacagaagagaggagggatcttttgtgagacctttgcaaatttctgctgaaactgcacaaaagcttgcagagtccttgaatctgccgcttgaacagatcatgcatatgcctcagcatattctgcttgccaaaatggctgaactgcaaaaagaggacaaatcatagccttcattcacatacttgcttacctgtttcgggataatatcatgtatatgttagaaaagaggagtaactgctttgccacatccacataataaaaaaatccaatcattttggctgatcaccggcattatctttatcgcctttaacttacggcctgcgatcacttcagtcggtccggtcatcagctctatccgggcagagctgcacatgtccaatggggcagccggttttttgaccgcactgccgctgctttcgtttgcagttctttctccgcttgcacctaagcttggacaacgcctcggaaatgagcgaactttatggctaggtctcgtgatactgcttatcggtgttttgactcgttctaccggctatactgccgctttgtttttcggaacggcacttatcggcgtcgggattgcgattggtaacgtacttttgccaagcttaatcaaacataaataccctgaaaagccagggatcatgatcagcctgtatacgacatcaatgaatatattcgcagctttagcatcgggtgtcagcgttcctttagcgacccagatgaatcgcggatggaaacaagcctttctcttatggggcgggctggctttgcttgcattgctgatctggatacctcagctgcgccatcgagatacggcaaaccagacaatgaagctgcaatccagttccatttgggcttccaaaatggcatggtatgtcaccatctttatgggcctgcaatcgtttttattttacagcagcatcgcttggtttcctgaaattctccgttcacacgggattgatacggcaacagccggatggatggtatcactcatgcaatttgcgagtctgccttccacttttctgacgccagttttagctgaccgtgtgaaacagcagcgcggtatcgttgcggcgctggcctcagtttatctgatcggcctctgcggattattagcgggcggaagccatacattgcttgccatctggatgatcattatcggtatcgggcaaggctccagcattagtctggcgctcactttgattggtctccgcagtgaaaatgcccaacaggccgctgcgctgtcaggcatgtctcagtcattcggctacctgctggcagcagtcgggccaatctttgtcggctatctctttgaccagacgcattcttggacgatgccgattgtgcttctcattgctgccctgatcgtaatgggagcagccggacagggagccggacgagatcgatacatttttcagtctgaaaaaaaaagaaattcagcataaaagcggggaaaatatctccgcttttttctttgaatatttatggtttattcataagtttttcatatttgttttttacaattagacaccataaagaggtgaaaaacgatgaaaaccaaacgattcgacgcagcccttatttttattttgctgggagcagcttttttgaatacgtatcacatttggcaggatgatgcagcgaaccagtactatttggcggctgtaaaaagcatgacgcaaagcttccataatttcttttatgcgtcatttgacccttctggatttgtgacagtagataagcctcctgtcgtgttatggattcaaacgattttcgcactgattttcggtgttcacacgtggagtgtcatcattccccaggctcttgccggagttggatctgtcttccttctctacagaatgattaagccgacttttggagttggagcggcccgcattgccgcacttgtcatggcactgacccctatcgcagtagctgtcagccggacaaacaatattgatagcatgctcgtttttaccatattgctcggttcagcttgcctgtttcgggcagtaaaacaaggcaagctggtttggctgctgatggcatttgccctgattgggctcgcctttaatatgaagatgatgcaagcgtttatggtattgcctgcatttgtgttattctacctggttgcatctcgggtttctctgaagaaaaaaatcgggcccctgcttctgtctcttgtccttctgacaggcctttcactctcatgggcgattgcagtggattcagcctcttcctcaagccggccttatgtaggaagcagccagaccaactcagtgctagaactggcctttggctacaacggcacagagcgtctgcttgggcaaactacgggcctagcaaagggtgatatgaatgctgctggcggagggaacatgcagaatcaagacaacatgcaagcgccaaatggcaacggttcatctttttctcagaacggaaatcaatcattcggaaaccattcacaggcgcctcagccgcctaacggacaaaccggcgctctcaatggaggcggaggcacacctcccacaggtggcaacgggcctggaaatggagggcctggcggcggaaaaagtatgaatatgttcggcaccggtgatcctggcccgcttcgtcttttccaatcagcactttccggccaaatcagctggatgcttccattctcattgatcggattactgggcgcaatcgtcagctggtaccgtgatcgccgcggacatgctgctaaaatgaaagaaacgctattctgggcggcttggcttgttcccgtggctggtttcttcagcatcgcaggattcttccaccagtattatttgattatgctggcaccgccgattgccgccctttctggtatcggatggtatacgatgcaccgcttatacaaaaataataaagactggtccagctatcttctgccggcagccgtcttgatcacagccgtgtttcagatgtatattctgagcgcttatacaagccaaatcggcagtgtatggatgtatgtcctggggctcttaggactgggcatcacccttgcacttctgatgcttaaacgcagccatccgttcagtaagctgctgaccatcatcagcttgtgcgttctgcttctcacaccagtttactggtcagcaacgccgcttctatacggtggtaacagcgtccttcctgaatctggcccgcagctcaaaggctcagcaaacggcgggaacatgttctcttcagaggtcgacagcgggctcctgtcctatctgagaaaacacaataccggcgaagaatacttatttgctactttgacaaccgtaacagctgcgccatacatcatttacgaaaatgaatctgttatggcaatgggcggatttaacggcacggatcccattctgactgtgtcggaactgaaaaaactgatcaaagaaggcaaagtgaaatacttccttctgtcagaaaacaactcaggcaacagcgaacttgtttcctggattaagaaaaacggaaaagaaataacatctgacgagtacagcggttcctccagcagcacgaacagcgtgcagggaatgcgaggaggacctggcggagaaagccagcaaactctttatctcgtggaataaaaaaaagaggcttggatgaatccaagcctcttttctattaagcttcttcttttacatgtacctttaacacagcctgcacttcaggatgcagcttcacaggcacgttcgtatatcctaatgcacgaatcccgtccggcagttcaagcttccgcttatctactttaatgttatggtctttttggagctgttcagtaatttgcttgcttgtcactgaaccaaataaacggccgccctcacctgattttgcgctaagctcaacagtcagtttttctaatgtctctttcaagctcttagcctgctcaagctcggcaatggcttcttttttctctttctgctgttgtccgtttagcgcgctgatgtttgaagcgttcgcttcaaccgcgaggccttttttaattagaaagttatgcgcataaccgtctgctacgtttttgacttcgcctttttttccttttccttttacatcttgtaagaaaataaccttcatctctgtacgcctccctcaaaatactcatctatggcgtgcttcagccgttccagcgcttcagaaactgaaatgccggacaactgagtcgccgcatttgttaaatgccctccgccttccagggcctccatgatgatctgaacatttacctcgccaagcgaccgcgcactgatacaaaccgtttgttcatcccgtctcgccaccgcaaatgaagcctcaacctcactcatcgacagcagtgaatcagcagcctgcgcaatcagcacttgatcgaagtattcctcttcattttcaggaagagaagcaatcgcaatgttatctttatagaggaccgtatgctggatcagcttcgcccgtttaatataggaatcaacggtttctttcaggaacttctgcaccagcaccgtgtcggcgccttttgcccttaaataagaagccgcatcaaaagtccgcgagcccgtgcggagagaaaagctctttgtatccactattataccagctaatagggctgttgcttcaatcatattgatttttaagcgcttcggctgatattcaagcagctctgtcaccaattccgctgtggaagaagcgtatggttccatataaacgagcagcggatctctgataaactcctcacctctgcggtgatggtcgatgaccacgatatgttcaattttattgaccagccgttcctccataacgagtgacggcttatgtgtatcaacgatcacaagcagtgtgtcatcattggaaatttccattgcttcttcaggcgtaataaatcttgaccacagttcttcatattttttgatttccccaatcaaacgctgcacacttgatccgatttgatttgggtcaatcacgataaaaccatctttgttatttgcctgagccacctttaaaatcccgatcgctgcgccgatagaatccatgtcggggaatttatgccccatgataatcacattgctgctttcggtgacgatttcctttaaggcgtgagaaatcacgcgggcccgcacccttgttcgtttctccattgggtttgttttaccgccgtaaaacttcaccttgccgtttggcagcttaatggctacctggtctccgccgcgtcccagtgctaagtccaagctggattgcgccaaatcgccaagttctttcagggaagagactgaagccccgacaccgacgcttaacgtcagcgctacaccgtcaaacgaggttttttcccgcacttcatcaagaatcgaaaacttcgaattttcgagttcagttaagatgtgttcattaagtacagcgataaagcgttctgaagacgtccttttcaagaagatcccgtactcctgcgcccaagcgttcagcaaagatgtcacctggctgttcatcgtgcttctcgtctggtcatccaatccttgtgtcacatcatcatagttatcaaggaaaatatatgccaggacggttctttcgttttcatatagcttttcaatctgaatttgttctgttacatcaaagaaatataacagacgctcatcccgtttgatgacaaccctaaacttgcggtcattcaatgtaaccgtttccgattccacctcttgtttgataagcggcactaccgattcacaagtatcgtaaagtgatctccccactaaagtgctttcattaaagcaagaggaaagaaacggatttgcccattctatataatattggtcattaaaaagcatgattccaatcggcatttccatcaatgcctcttcaccgacttttttcaacctgtaggacaacgtagaaatataagcatcaatctcttgtcgaataagagaatcagcacgcttaataaaaaacaaaataactgccagcagcagcacttcgacggttcctaatatccagttaaaataaaagctgatgaggattgtaataattgacagagcaatcaatgcatagatgggataccgaaacagcggtttttcataaaagcttggcatttctatcactccccaccatgtgagtaaaactcatgttcacttcaccttattccttatatgaaagcccatatctaaaacgcctaaaatgcgaatggctgccatgaagaccggatgcacaaacccaagtatgacagcaatcacagccgcagcctttggatattgtttcttatggcaatagaaaaagataaatgataaaccttggatgaaaatcagaaacccgagtataaactccccatttaaagcgatagagtacagcatttggcctttttctaaaggcaaaaatgaaagcatgacaataatcaaatacagtactacaacactttgcggaaacttcaactctctaaaaggctttagattaggaatatcgggggagaatcgccttaagagcggcttagcgataaggtaactgaggaaagaaaaaataactcctaccatcacaatagctgttggaaaaagatattgaacgatacccaattgttcttccatcagttttaattgcttctcaaactgtccagcattgcccgactgcttcgctacagtttctaccatatcaagagattgccggtattgtgtcatcgcctcatcaatgatattgatacccaaaaactgaatgcttatcacaaaatagaagacaatactaagcatataaataagagcgcccgaaataatggcgtgcccgggctctttccttttgaaaaaatgtcccatggcaatgccggcgcaagctgacataaaagctacaataagcccgttaaaggacccgacaataaaaacaaccggaagactgacagcgcccatccatatccctagcttcaatccatgtctgatcgtatacaagatcattggcagcggcagtgcaaataacagaattgttccaatcacaggaacataaacgaccagaagcgtgatgatcgcaaacagactgattaaaatagcaccttccattaaagctctcgtttgtttcacttagtcacctcgtatcatcctgaacatacgaatagaaaagagcagcataaacgactgctctttttcatcgctgcaacatacgttgcaccgaatgtttttatatcatctctaaattttacttttatattttaacataagtccaaatcgcaagtaaaatgacgctaatgtttcatgtgaaacataaaaaatgaaaagacattctttgaaaagaatgcccatcacaattaatgtttatcatccataaagccagaagattccttgtttttctttttcgtttttctgacatacataaaaattaagatcaccagtaaaagggttgttgcttgcagaacgccgctgctaaacaagaaaaagttctttatcatgtcccacattgtgtttcacctctttgtgcatgttctcaacccgtatcctatataaggtgaatttccctttttataaacttcaaaacatcatgaacaacattgagcgttgggcatatgctgatatggaatctgatcgataaaggagaattttcacatggatgaacgcagaacattggcttggcatgaaacattagaaatgcacgagctggttgcttttcaatcaaacggactcattaaactgaagaaaatgataagagaagtaaaagaccctcagctcagacagctttataacgtgtctattcagagcgttgagcaaaatttgagagagcttcttccgttctttccacaggctccgcacagagaagatgaggaagaagaacgcgcagataacccattttacagcggtgacctgctcggttttgccaaaacatctgtccgcagctatgccatcgcaattacagaaacagcaacacctcaattaagaaacgtactggtcaaacagctgaatgctgccatccagctgcacgcccaagtttatcgatacatgtatcagcatggatattatccgtcttacaacctttctgaactgttgaaaaacgatgtcagaaacgccaacagagccatttcaatgaaataaaacaagcagcaaaggagttccctttgctgctatttctgctgatccttcactaagccgttcgaacgataagattccagcacgtctctgttggattctccccattctttcatttgcaaaacaatcggttcaagcgttcgcccgaattctgtcagagagtactcaaccttgggcggcacctgttgataaacctcacgatgcacgatgccgtccgcttccagctccctcagctgaagagtaagcattctttgagtaatactcgggcagattcgccgaaactcattaaatcgtttcttgccatctatcatgtgataaaaaagaattcctttccactttccgccaatgacatctagagtaaattcaactggacagccttctttgttcgggtatatattcttttttccactcattcttgaccctccaatagtaccttttttgatactacattacattttgcaactaagctacccagtattttacacaccttttctccttagctcaaagaaaatgcttcttattcacatcaatttttaagggtttgcatgattacacctgcagcaagacgtgttaaactatataaagattacactacttaaaaaaaggataggagctatcatggaaaagatacttattttcggacaccaaaacccagacacagatacgatttgttctgcgattgcttatgctgatttgaaaaacaaactcggcttcaatgctgagcctgtccgtctcggacaagtcaacggcgaaacacaatacgcgcttgactatttcaaacaagaaagcccgcgtcttgttgaaacagctgcaaacgaagtaaacggcgttatcctggttgaccataacgaacgccagcaaagcatcaaagacattgaagaggttcaggttttagaggttatcgaccatcaccgcatcgctaactttgaaacagctgagccgctttactatcgtgctgagcctgtaggctgtacggctaccatcttaaacaaaatgtacaaagagaataacgtgaaaatcgagaaagaaattgccggccttatgctgtctgcgatcatttctgattccctgttatttaaatctccaacttgcacagaccaagacgtagcggcagcaaaagagcttgcggagatcgctggcgtagatgctgaagaatacggcttgaacatgctgaaagcaggcgctgatctaagcaaaaaaacagtggaagagctcatttctcttgatgcgaaagaatttacactcggcagcaagaaagtcgaaatcgcacaagtaaacacagtggacattgaagatgtgaaaaaacgccaagctgaattagaagctgtgatctcaaaagttgtggctgagaagaatcttgatctgttccttctcgttatcacagatatcttagaaaatgattcacttgctcttgcaatcggtaacgaagcagcgaaagtggaaaaagcgttcaacgttactttagaaaacaacacagccctcttaaaaggtgttgtttcccgtaaaaaacaagtcgttcctgtcttaacagacgcaatggctgaataagcaaaaagcatcccgcatcgggatgctttttcttattcacccagcttctcaatttgtcccatcacatcagtaatttgctttgcgttttggaccaggtctgactgctccaattctttaagcgataccttgccttcctcggcttgtttcaacacctcttcagcgcttttctgcaaggtttcgttatgctcctgaatggttcgatgaatctccgctgcggcatcaggcggcgttaattcattaaaatcagcggcatccttctgaatcgattcaagctgcgcttcaagtttttctttcgcctcggtgtcatttacagctttctcagccaattcaggcgcttcctctgcaaatgtcttcaccttctccacataccccgctgcttcactcgtatagttcaatccgtcgttcacctgatcaagcatgccgcatccgcctgcactcaaaagtcccactccggcaagtactgtcaaaatgatcttcatcttcagccccctcatcgtttctttttcattttttcttttaagatcggaatcaatttctctttcgctaacggcagccctttcctcaccaattcacgcttcagccactttttcagcttagacattctgatgctcctctccctttttgataaaaatgaaaaaactccaccaatttggtgaagttcctgaaacaaaaagaccttcaccaaatcagatttggcaaaggtctcgctaacaaatgagattgccagcaaagccgaggacaacttgtcccgtaatgacgactttactgtgaaagctactcccctttggagtgttcatttttattactttcattctaaagcaccgatctgttccagtcaaattcctgccgtttatataaaagcgcgctgtggtatttaaaatttgaatggtttttccatcaggagatcatgctatgacagaggaggttttcatcatgagtcaagagcgcgtgaaacggcctgggcataccagatggtacatatcttcgttacttagcggcattattattcttaattattttgaccgagtggccatctcggtagcggcccctgcgatacaagattcgtttcaccttactgcaactgaactcggcatcgtgttttccatttacacctattcctatacactgatgcagctgcctgtcggaagtttgctggaccgttttggggtcgcatgggtcacgagggttggaatgacaatatggagctttttaacgatccttcttgcttttttgcaaggaaaattgctgttgtatctgttccggtttctcattgggctgacgagcgcctctgcgttccctgctgcctctaaagcaaccgctctctggtttcctccaagtgagcggggattggcaaactcactgttcgattcggccgccaagttttcaaatgtaatcggcgcgccattggtcgcctttcttgtcacaacatttgactggcgtgtcgcttttttgacgattggatgcatcaatgtgctgtttacgatctttttctggcagtattatgaacagcctgaacggcacaaacgtatttctaaaagtgaactaaactatattcaaaaacacaatgccattacaacagagcaaatcccttacaaaacgggcccgcttttaaaaaagcttttcaccaatcggaaagtatggggcttaatgatcggatttacagggtacgggtatacattcaacctgctgctcacctggcttccgactttctttaaacatacatacggtatggatctcatgtcgtccggtttatttacggcagtgccgtggctgatctcaaccatttccggaattgccgtcggcggctggctcgtcgattattttattaagaaaggctatcctaacaccaaggtgtaccgaaccgtaatcatagtcggaatgagctttggctttttctttttaggctccattctgacgaacaatattaccgtagccattatttgcatttccatcggactcgccggaatttcagcaaccgctccggtcggctggtccatctccgcagaactcgcgccgatcggttccgtatccatgctgagctccatggtgaatctcgcaaacaacctgttcggaggcattattgctgcgtcactgacagggtatttgtttgatgtgacaggctcctttacactcagctttctggtagctggttttgtgctgttgctgggattggttttttatgtgtttgtattaggggatgtaaaacgaattaaactggaatgaagagtgcttgctgaaaagcactcttttctttgaatccgccaggtgttattttctttctcccaacattcactaggctgtcttcggacgaaaacaccaccattttatccttgactccaaccaaaggtaaggcctcatagtgaaagaagaaaggaggagtcagatggtgaaattaacagtaaaagaactatccaatattgcgaatgtcacaatcaaaacgctttatcattaccacaaaatcggcttgctagccccaaaggaaataagcgaagccggatatcggtactatggtgctgaagaactaaaaagactgcaggaaatccttttttacaaagaattagatattcctttgtcagaaatcaaaacattactaaaagaggatgctgaaagaacaagtacattagaaaaacaaaaaaagctgtttgaaaagaaaattgaaaagtatcagcgtctcattcaaacagtcaacacatctttagaatacacgagaaaaggcgaaaacatggatcataaggtaatgtttaaaggatttgaaagcgctgaagaatggaaacaatctttagcagaacaaaatgggtatttaaaagagcgttacgattttgaattggatacacatacaatcaatgtcgatgaaatgaacaaaatggcaatagaggctaaacattttcttgataggatggctgattttttaagaaacggtgtaacgtatcatgacccttccgtgcaagagcatgtcatgaatcatcttaagttcctaaatcagaacgggcatccgacaagtaaagaagattacgtaaaacaaacacgtttttttatgcaagatgatttccatagaggaatgttagaagagcagcaaaccggtttatcttattatttggttgtcgttgcagaacacctgtagtgttttgtcaccctttatagggtgacagccatcaggattacgagacagcaccgccaacaatcgaaacattctgccggtcaacggcaaaacgccgtccgttccattttaatacggtttgaacatatcccaatgagtcggcgttataccttcccgctatccgctggtacgccaataattcgtatacgccgtctctgtcaaaatcaaccggatacaaacccgataaaggattcacccatccttctatcggcatttttaacacaccttggctgttataaatctcattcaaatattccctgcctttgtaagtaaggtcgaggatatacgtttcgttttgctgatgactgatgacgctcgctttatattgattttgatacctcacactgtactttaattcatcattcaatacatctgaattgaaaattcgccggaactgcctgtttagataggcaaacacgtatgcataaatagcaccgccgcttccccctgtatctattaccaccgccacatcctcaatcttgtcgcctgtcatatcccccagaaaaagtgacggattgtatcccatattgttttgaagctgaatctgctgctcctgatgggttctgccatcacagatcaccaatgtgatatttctccataacaggctgccgggcatttgatttccagttagaaagacctcatcaataacgccgtctcccgttacatcgccgcgagtagatgcaatgattgcacgtgaggagacaggctgccgaaatacgtatggatgttgaacaagtcctctgctttcataaaaccaataaggagccattctgatgtcatacacattcaattgtgtcaccttccctaatcagctgaatgaatcattatatgcaggaatggcacatcaaagacatatcttacacaccaattaaatccgtaccataagagttatcgattacacaaagccactcgccttgcgcattcttcttaaatacataggtcgcccttctttccatcgcatactcggagtcctttttatccgaatcaagcagtgtctgagaaaggacgagtaccgtgtcacctgcttctaacaggatcatttccccttgtttcgggacaatatgatgattgaaatagttcacaatcgtaataaacgcttttttgatttcttctttgcctcgcgcgatcatgcccggcttcacgactaaaacggcatcttccgaataataattcatcagtgtatcaaaatcttcattttggattgccaaatcacacgcagagatgatgtctttcaattgctgttccaaatgaattcccccaatcatcatgattggatatattatacatcgctagaccactgaaaccttgaaaacaaaatgaaaagtatccttttttcctatataatcaaatagatatatttaacaaagtacccaagtgaaggggtgaacattattgtctgcggaagtaacgttacatgacaatatacattatgatttaagtgcggattgccagcactgttttggcctgtgctgtgtcgccttgccttatgcgaagtcggcagattttgcttttgataaagacgggggcacgccttgccgcaacttacaatcaaactatcaatgttctatacataaagatctcagagaaaaaggatttcgaggctgctctgcatatgaatgctttggcgccggccaaaaagtatcccaaatcacttatgagggaaaggattggcgaaacagccccgaaacggccaaccagatgtttgacgtttttcctatcatgcagcagctgcacgaaatgctctggtatttacatgaagctctttctatagatatagccaagccgattcatcctgaactgagaaccagtttcgaaaaaatagaaaggctcaccaggctcagcaaagaacgcttgctgacactgcaggtggacgagcatcgagctgaggtcaatgaatggctgttaaaaacgagtgaactggtgcgtgcccaagcccgccatccaaaactcccgaaaaaggtcagccggggaagtgtcctgatcggcgcgaaactgaaagggcttgatctgcgaggagcaaatctaagaggggcgctgctcatagccgccgatctgagatttgccgatttgagaatgacagactttatcggtgcagatatgagagacgctgatctcagcggcgccgacctgaccgggagcatctttctgacacaggcacaggtgaacgccgccaacggcgattcgaaaacaaagctgccgctgtctgtacgaacccctgcccattggaaataaaaaaggacccgctaacggtccttttttactgatcaattcaatcctttttcgttccttttatccggcattttcacacttcttgccaagtatcccgacagccataacgcaaccagcagcatgaaggtgatcataccgacgacgcccagccagtgaaaagcagaccagaatagccctccgactgttccgcaaacacttgaaccggcgtaataaaagaacaaatacagcgatgaagcctgtgctttgttatgaagggctctcctgcccacccaactgctggcaactgaatgtccgccgaaaaaaccgaatgtaaagagggcaatccccagaattttcactgccagcatactgtttatcgtgaataaagcacctgcaatgacgatgaaaatattcatcaccagtatttttggatagccatatcgatcaaccattcttccaatgaaagacgagctgaaaatgcctacaatcatcacaataaatatccagctggcaaatgctttattaagcgaatacggcgggcccaacagcacatacacaatgtaattaaacaaggcaacattgcttccgagcagcaaaaaaccaatgagaaacaaactgaatagttttcggtccttcaagtggccaatcagagacattcccaatttcccgagcttcaattttcttggcgtaaaatgcctggatggcggcaaatttataaaaaatataacactagcaatcaaactaatgacaccaattgatcccatcgccatatgccaattcaagtactcgctcaggagcccggaaacgatccttccgaaaacggcgccgattgcatttccgctgatatacagccccatcgccgacccaagacttccgggttcaatttcttccccgagataagccatcgcaatcgacggaaggcctgcgagcgcaacgccttgaatggttctcaatacgagcagcgtatgaaagtttggactaaaggccgatgccagacagagaaccgatgcggccagcatggaaatacccataatcggcttgcgcccccacacctcggataatgaaccaaagacaagcatgctcacagctaacagcattgtggtaacagataaagaaagactcgccgcagtaggcgttacatgaaattcccgcgtgaattcctccatgagcggctgtacgcaatatagaatcgcaaatgtattgaaacccgcagcgaagaaagcaaacgtaatttttcgaaaaaccggtgtgcctttttgaatgtatgtcatcgggactttatcggtccctcatcatgttgtggagcactgccattcataaacaaccatcctttatttcttccgaattcaaacatcctcgagtctgtttatattactatcttagcaccgttgatatatgttgtataatgcatataaaatatcattttcatgcttatatgtaataaaggagggatgataattggaatgggaacaacttgaatattttcaaacactggcccggatgcagcacgtcacgaaagccgcaaaaagcctctccatcacacagcctgcgctttcacgctctatcgccaggctggaaaatcatttgggcgtcccgctatttgacaggcaaggacgatccatcagcttaaatcaatacggacacatttttttgcggcgggttcaggcgatgatgaaggagtacaccgaaggaaaagaagaaatccaagccttattaaagccagaccaaggcgtagtctctctcggttttttacatacattaggcaccacgctcgtgcccgatctcatcggctcctttcagcaggaataccccaacattgccttccagctgaagcaaaaccactcttattggctgcttgaacgattaaaatccggagatctggacctctgtctcctcgcttcgattaagcctgaaaatccgatccaatggatcaagctgtggagtgaagaactctttgtatttgtgccaaatgatcatccattagccagtcgcgaaagcattaccctgaatgagattgccggggagcgttttattttattgaaaaagggctatgcgcttcggatgacggtcgatgagctgtttgagaaggccgatatacagccgaacattatgtttgaaggagaagaagcagctactgccgcaggttttgtggcagccggactgggcatatctattctcccagacctgaaaggcttagaccaaagcaaaatcaccaaaatccgcgtcagctggccggaatgtcagcgtgtcataggaattgcctggataaaaggcaggtttttatcaccggttgctgagacctttaaacaatatgtgatcagccatttttctgagtagggaggattcaaacatgaatgtcaaaaaaatcacgtcagaacaggatttacatacagcgtttgaaatcagaaaggcagtatttgtagaggaacaaggctgtcccatttcggatgaattcgatgagttcgatacactccacggtgactgccagcacatcctagcttatcatcagaatgtacctgttggcactgcacgtgtccgtatcgttggccacgcggggaaactggaacgaatctgcattctgaagtcttaccgcaaattcggtttgggaaaagtgatcgtcgatgcattagaacgtattgtgaaagaacaaggcatttctgccttcaaactgcacggccagacacaggcggcaggcttttatgaaaagctcggctatcagactgcatcagaagaatttatgctggacggcattccgcatgtactgatgacaaaacaagacgattctgctttatagattgttcacaaatttgtcacttatgagcatgaacagttcattggtatactaatcaccgattatggagagaaggaatgattgtatgccagcaaataaaaaagagggtcttatatttggcgtgatgatgtgttttggaatggtctgcgtcatgtcgatttacaatgccatcatcaacggagccattcaggatttttcactggtgaccgtttttgaaatggccatcggttttatggtcgccctcctgttcgatttactgttagtgggccccctcgccaagaagattgcattccgcatgccgttcgacaagactaaaaaaatttatgtcatccttgccatgtcaacttgtatggtgattggcatggtactttgtatgtctgtgttcggtttagtgacagcggttctggcaaatgggctgaacggggacagcctcttcagtgcttaccttatgatggtgttgaaaaatttcatcctggcctatccattgcaattactgattatgggcccattagtcagagggattttcatgaaatttgtaaaaccaaagctcaaaactgcaatttaaatagaaaaggagtgagcctgacactcactccttttgctcatgaatcgaatgtaaaacaagctccgcaaaagcctctgcggcaggcagctgccattttttctttttgagtaaatcggatcaaggactgcaccatgctgaagaactttcagcttatgtttttcacttccattaatccctataccttaccaaatagtttttatacaattcttcgttataaagaatttcttcgccatgtgaagagcaaatgagcgttggtttgatttgatctatgattgagccgctatcgatgttctcatttatatcaacactgaatcttcttataggtgggtgtaaatcctccttacttgtgataaaaaggtcgcccgttaatagcgtacgatcgattttatgatcatacacgacatgccccggcgaatggccaggtgttaaatagtatttcagaggcaggtgagcaagcgtttgctccgtcagcggctggacaatatgggctacccctgtgttctccacttcatttttgttcggatatggctcttccccattgatgtattttagttctttctggtgcgcaaaaatcggaatatcaaatctcactaaccattttgatgcacctccgatatgatcactgtggccatgggtaagcaaaatggcttttggattgccgatcgctaacgctgccctaatttgagcatcagcaaaacgttctattcccgtatcaacaatatatacatcatcaccatctttgataaaccaggtatgaaccggaatccgaagaggcacatcaagctcaaattcacattgatagacatgctctgataattgtctcaagttcacgcaaaccactccctttggagatttttgatagtttaaaagaaaaatagaagtgaacggactattttcaaggcagattatcttgaaaatggtcccacactccagcggaccggtattcttgaggaggagacgccgattttcgccagcatcagctcgacttgttaacattgtccattaataatccctcttgttccccttcttcacatactcccaatcacgttctatattcttcctcactctatgaaggagtgcagaaatggtttccttttcctctgaagtaaaaccggacaaggccacttccgtggaatgttctccttctcttcttaacaatggatatacctttttccctttctcagtcgggaacagtttttttatttttttattttgctcatctggcagtttttgaataaatccctgcatttccagcttcttaatggcccgcgcggccgttgtccggtccacctttatcatttccgccaatttttcttgaataattcctggattctcgtatatacgtacgagatagaggtactgccctcttgttaagtccaaatctttaaattcgatgttgcttatggaatccaacgctcttgctatcatgccgatctcacgcaaaatatcattcattcctaaaacccctcacgtatttttgttgcaattacaacaaaaatgttttaaccttactattataagaccacatgcgtgctgtacagtccagactaatatcagaaaaggattgattcataatgaatataaaaagaataacaactgaagctgatttacatgaagctttgaatattagaaagacggttttcattgaggagcaacatgtatcggaatccgaagagttcgatgaatttgatacgctccaggaacaatgccagcatgtcttggtatatcatgagaatcagcctgtcggcacgggccgtgtgcgcatcgttgaccatacagcaaagctggaaagaatctgcatcctaaaaccttaccgtaagtatggattgggaaaagtcatcgtaagcgggttagaagaaatcataaaagaaaaaggactgactgcatgtaagctgcatggtcaaacacaagcagcaggcttttatcaaaaactgggctaccagatttcttcacaggaatttatggaagacggcatccctcacgtcctgatgacaaaagacatatcgcggatttaacatgaaatatattttttacggattaggaatacttatattaagtttgggcatttccttaaccatacaatcaggactgggcacatcacccttcgatgcccttttggtgggtctgtcaaaagaaatcggtcttaccgtaggaagctgggaggtccttatttctgtgatcctcttaatctgcaacgctatattaacgagaaaaaaacctattttgctgggcttgattacagcattcattactggaataggcattgacctatggttgtttgttgtaaaaaacaccctctatctaaacgcgttgttaagcaaactgatttgtttcggaattggtttggtgctcatcggtcttggaacagccatctatcttcagacgaaattcgcatcaacgcccatcgatcatttaacacttattatccgagatctctccaaaagaacaatcttgttttcaagaacattggtatacgctcttttcttagtattagccatcatctttaaaggccctatcggcatcggaaccctattaaccgtctgtttgggaggaatgatccttcacgtttttatgcctattgtggaaaaacaattcttatcaaaaaaaagaaggggttaaaaaacctcttctttgaaaaaacgaaacgcaaaacaagctacgtttcgttcaataattttatgataaattaaaatttatagtaccaaaaaatcgcaatttcatttgctgttggaaggttggaataaagcatcgtatcaactgcacctattataaagtgatgtttggcataaaaacgacaagctgaaacattaatatcttgtgtttcaagcataagaccaaaaaagcgattctcctttgcccactcaatcgctttatgtaataatgctgttccaacgcctttttgtctatagtcttttgcaacggcaatgtcctctattagtgcatacccattccagttagaacgaatcttaatccggccgatgcagttgttttcaacataatataaaaaaaccgcttttccctcttcttcaacataactaacatccatttcatcatcttcatattgtttaaaataaggtttagaaaatcgttcctcagtatatgtccaaacaccgttttcaaaagcaggtatcattctcccaaaaacaacgaaaggttcatttggtttattgaaatctttcaaattcatttgagtcattttcttgatcatatcaatcccctcctaaacgagattatattagcatactcgtttcgatcgataacagcttccaaaagggcactctttaaaagaacagcatccattaccttttatataagcgatttttctatttcactgtcttaatggggtatttcaacagaggcttgtggtacagtaaaaaggaatagaaacaagagaaaagaagatgaacctatgcccactaacaataaactcaatgagaaatatcatacttccttcaactcgcccacaaccctgttgactagtatccgtggagagaggaagctttgacacagcttctgccattgatgacatctctattgaagtatccaaaggacaaccaaggatcgctatttgactttttcaagaagaaagtagagtgaataaaggagtgattgagtatgttaacaagagaagatatctttaaacacgtcaaagaaaaatacggtacatcgcctgattacccgtgggagaaatacccaaactatgcttctttgagacatacatcaaacaaaaaatggtacggtcttatcatgaatgttctcccagaaaaattaggcttggatggtcatggcgaaatagatattctaaatctaaaatgtccccctgacataagtgatagcttaagaaacggggaaaatatcttacccggatatcatatggataaggaacattggatttcaattgttttagaacggacagatccagaaggcgaaatctataacttaatcgagcagagctttcatttaaccaagtgaagataaagagtgttccggctaatcaagctgcgaagagtagtgggcactttcattttaggatactgttcttcactcagtccataaacgcaacttagtctatctggtgcgagagtgggagaagaatttctaccaacttcttatggaaaaggatgaatagttatgacaaataacttaaaacagagaagaatcattttagatttagcagttactttagatggttttattgaagggaaaaatggagaagttgattggtgcattatggaccctgatatggggtttactgatttcttaaatcaaattgatactattttatatggcagaaaaagctacgatttatggggacaatatattccaaaagatgaagaccctgatacagaaaaggaaatttgggaattggttcatagtaaaaagaaatatgttttttccagaacacaaaatgagattgataatcaagccatatttataaatgataatattcttgaagaaggaaataaattgaagaaaaagtctggcaaagacatctggctatatggtggagcgagtctcattacaacttttataaatttggggcttgttgatgaatttagattatctattcaccctgttgttttgggagaaggaaaaccgttgtttattgatgtaaaacagaggataaatttaaaaatggtgaatacaagaacattttcctctggcgttgtgcaaatcgtttatcattggaatggctaacattgtaaagtaacactcgacagtaatccttcttattgaactaaaggggaatccataaataatgggttccccttaatatactatggaactatcaatatcaaattttctgtaataaaagaggattgaaaaggacggtgtctcctccattaacatcattaagcattatagtatattttcttctccctcttttaagtaaatcggctaagttttgtgtttataaaaaaacgaaagaaggtgatcctatgcccaataacaataaatccaatagattaatcgctgagaagtctacttattttacttcaacatgctcataaccctgtggactggttcccttggggagaagaagcatatgaaaaagcgaaacgcgaaaacaagcctgttctcgtatctattgggtatagctaacgatggctaatctaaagaacatgctattgatgccatgtttattcattttacaaaaaaggatcaaccttgaattactttcacaagattgatcctttcactcatttagccatgtctccgcgaacgtttatatacattcaagattactagccaacaaataacaatgattcctgcaaaaagtatgagcatattgctatacaaataggtagagtgatcaacgtcaataggcagcagcctatgatctaggaagccgatagataataaaccgcctacaatcgcaatacccgttccctctgataaaaagctcgtgaaattaagcaaactcattccagcgcccgcttccttttctttcaaactgctagacacaactgtagatataactgtttttgtgaaagatagccccccaaaaacaaaaattactataattgtcatgatccatggtgctgcatctataaaaaaggcagcgattaaaaagccggaagaaagcaatgcacttccaatagttagtacatacaaggaacctttccgatcaacaagcaatcccccaatgtaaccaaagatgatgacactcattgttccggggaaaataatgccgcttccaattgctgcagtacttaaatggtgaacatctttcatcatgtaaggaaccatagagacaaatcctgctactgtaccaaatattagtcctccgcaaagggttccaatcacaaaaaagacgtttttccctaattcagggtcaacaaaagggtcctgagctttcctaatgtgttgcacaaatatgaagaaagcaaggatactgatgatcagaaaagaaaatctataagatgttgtaaacagcataaaaaatacgatacctgcagacatcaatataatccctgccatatcaatgtgtcctcttattctctcttcctttttcaacaattttataaggaatggaacggtgataattgttgcagttggaataagcagcaaatacgaccaatggatataatgagcaaccattccgccaatagctggcccaacaccttctcccattgctaccagggacccgatcaggccaaatgctttccccctgttctcttttggaatatagcgcgcaacgacaaccatcacaagagctgggaatgcggctgcaccaattccttgaataaatcgggctagaatgagaataggaaagaaagagtgtccaacaaatccaatgatcgaccctaagccatttaccataatcccaaatagaagcagatttttgatgcccagctggtctgatagctttccatatagagctgttccaatggagaaggttaacataaaggctgtattcacccagtttgcacttgctggcagtttattaaactcgttggcaatatcaggtaatgagacgttcagaaccatttcatttaatacgctgaaaaatgatagaacacaaagccaaatcaaaacttgattgtgccgtaaagttgactgtgaataagacgtattcacaatttcccctccattaatgagggcagacgcagtttatagggtcattgatacgcttccctcttttaattgtaccctgttcattttattgcacttcataataactccccctacatttgattgatatgatcttattatatatagactaaggattaaacttttactttttttataaaaatttgaccagattgcgaaacaaggaaaaacgttattcgcatttatctcaagtggcaaaatgaaacattagtttatattttcacatcacaattatcgataagcagtcagttattgtatttgtttaggataactgtggtaacctgaatataaccaacttaggaagaaggtgatcccatgccaaataaaagtaaacccaatagattaatcgctgaaaagtctccttatttactccaacacgcccacaaccctgtggactggttcccgtggggagaagaagcatttgcaaaagcaaaacgcgaaaacaagccggttctggtcagcatcggttattcgacgacttgtcattggtggcctaggataatcaaatcgtgtggaactccattaaaagataacagaagccattttaaacgataatactatttgttcaaacaatacagtctaccttttatttcattcattttctaaaacctgtaatccgtaaccacgcggtagcaggtttttttatttgcttgacttagagttaactctaaattgtaaactaactttaattaaatgagagggatgatgttgttgtattccattagtaaagctgctgagaagactagtattagttcgtatacattaagatattacgaaaagattgggttacttccaccaccaaaacgaaaaaacagtggaaggcgtttttatacggagactgatattcagttcatgttattcctgaaaagtttaaaggaaacaggtatgtctttggaggatattaatgagtttgtcaaagacggatgcattttggaaaaaatcaattcggatgttaaatcggcacaactctccccatctataaataaacgtattgagattttaaccaagcacttagagaaaatggaaattaaaaaaagggagctggaagaagtgatttctactacaaaaggaaaactggatacatatttttcaattttgaaagaggaagtggaaaacaaatgaaacatttaaatatatacataatgttacttggcttctctattttcacgggagctacttttaatcttgcaaaatatacagttggatatttttctccatcgtcttctgcggcatggcgtttcggtttagcggctgcagtgatgctcatcattttgatttttactgaaggtataaagaagagtcaattacggaaaaacgccgtttcatacattattcttggaattataggaatctttggatttaatgccttgttttttgttggtttaaaatatacatctcccgttaacggagcattaataatggggctgaatcctttattaacagcaattctcgctcgaattatcttaaaggacaacatgacaaaaaaacaagtactcggcatattctttgcattcatcggtgtattgttagtcattacacaaggttctatcgaaaccattaaaaccttatcaatttcaggaggagacttaataatctttacaggtaacgtttgttgggcactttatggcgtacttggacgtcggtttgtaaaggatggtacaccgctatctacaaccacttatacgatggttattggtgctgttagtttaatagtagtttccttatttacatccaaacctgtttctttatcgaacatcccgattggagtttggggggcaattgcttttatggctttctttacaagtgttttgggttacctatggtggaatcaggggattaaagagattggggctagtaaaacatctttatttttcaaccttgttcccgttgtaacgatgattatttcatttgccgttggaacaccaataaaggtatttcaagttattggggctgtgctagttatattaggcgttttaaccgcttcgggggtaatacgtattcctaagtacaatactaaagaacagtcagctatataaagaaatagggagtatttttgagaaaatgtgttaagttaaatatacactaattataggaagaaggtgatcccatgccaaacaaaagtaaacccaatagattaatcaatgagaaatcaccatatttactccaacacgcccacaaccctgtggactggttcccgtggggagaagaagcttttgaaaaagcaaaacgcgaaaacaagccggttctggtcagcatcggttattcgacttgtcattggtgccacgttatggctcacgaaagctttgaagacgaagaaatcgcgcgtcttctcaatgaacggtttgtggcgattaaagtcgaccgggaagagcggccggatgtggattctgtttatatgagaatctgccagctgatgaccgggcagggcggctggccgctgaatgtgtttatcacgcctgatcagaagccgttttacgcgggtacatattttccaaagacgagcaaattcaatcgtcccggttttgttgatgtgcttgagcatctgtctgagacgtttgcgaacgaccgtgagcatgtcgaggatattgcggagaacgccgctaaacatttgcagaccaaaacagccgccaaatcaggcgaaggccttagcgagtcagcgatttcccggacattccagcagcttgccagcgggtttgatacgatctacggcggtttcgggcaggcaccgaaatttccgatgccccatatgctgatgtatttgcttcgttatcatcacaatacggggcaggataacgctttatacaacgtgacgaaaacgctggacagcatggcgaatggcggcatttacgatcatatcggctatgggttcgcccgctattcgaccgatgacgagtggctcgttccccactttgaaaaaatgctgtacgacaatgcgctgctgctgactgcttatacagaagcctatcaggtcacgcaaaacagccgctataaagagatttgtgaacagatcattacgttcattcagagggaaatgactcatgaagacggaagctttttctctgctttagacgcggatacagaaggagaagaaggaaagtactacgtgtggtcaaaggaagaaattctgaaaacgctcggggacgatctcggaacgctgtattgccaagtgtatgacatcactgaagaaggaaactttgaaggcaaaaatattcctaacctcattcacacaaagtgggaacaaatcaaagccgatgccgggttaaccgaaaaagagctcagtctcaaactcgaagacgcaagacagcagctcttgaagacacgcgaggaaagaacctatccgcatgtcgatgataaagtgctcacctcatggaacgcgctgatgatcgcgggtcttgcgaaagcggcaaaggtataccaggagccgaaatatctcagcctagcgaaagacgccatcacatttattgaaaacaaattaatcatcgacggccgtgtgatggtccgatatcgtgatggcgaagtgaaaaacaaaggctttatcgacgattacgcttttctcctatgggcttatctggatctctatgaagcttcgtttgatctatcttttttacaaaaagcgaagaaactgacagacgatatgatcagcttattttgggatgaggagcatggcggattctacttcaccggacacgatgctgaggccttaatcgtccgggaaaaagaagtgtacgacggcgccgtgccttcaggaaacagtgtggcagctgttcagctgctgcgtcttggacaagtcacaggcgacttatcactgatcgaaaaagcggaaacaatgttttccgtgttcaagccagacatcgacgcgtatccgagcggccatgctttctttatgcaaagtgtgttaaggcatctgatgcctaaaaaagaaatcgtgatttttggaagtgcagacgatccagccagaaaacaaatcataacggagcttcaaaaagcctttaagcctaacgactccattctggtggcagagcagcccgagcaatgcaaagacattgcgccatttgcagcagactaccgcatcatagacggcaaaacaaccgtgtatatttgtgaaaacttcgcctgccagcagccgacaacgaatatcgaagaagccatccaaacgttaataagcagcagggattaagacccttgctgcttactttttgatttcttatggtaccataaagcgatccccgcaaacacaagattgaccgctatcgtaaagaaagcctcccacatcgggttcccccgcgtaaccgtaaagagagaaggaattcctccatacacactgtttttttctgtaataaacatacacaaaaacatattattcgcggcatgggcgccaagtgatatttcgatgcttccagttttaatcgtgtaataggtccacacaaaaccaaatgttaaatactcaattcctgcccagacagcgccattgttcatttctggattcgcaaaatgcaatacgccaaacaatcctccgacaatcagtgtcaaaaatagaggatttttcgtcaatctcccgaaagcttgaagcaaaaatcccctgaaaaacagttcctcagctgatgtctgaatcggaaccaaaatgagggcagccgctagcagccagataaagcgtgaggcattaaactcttgcattgaatagctatcaggatgaatcgcaaaatcaatcaattgtacggcgatcatcagcaagaaataagcaataaagccaaaggaaattctccgccaattcatctttgaatttggtgtaatcacagttcggaaaggccgcttcaaaataaagcgcacagccagccaaactcccggaatggcgaataaataaatcacatgggacaaataaagatctacgaggggatcactcagcacagcttcatccaaatcaaacgtgatattgggattcacaataaccgtgaacagtatagcgaaaaggtaagctatattcccgaatacatataaccctaccatcaccaaaaaagcgaaaaaatatctccacaacgtattgtttccttctataggacggataaatgaattcattccttctatgtctcttcctttcaatgagaatattactatatatttgcataaattggtctatgaatctactgttttggaaatcttttaagcaaaattaaaatataaagtgtgaatttagttcttccatctagtgatttgaactctgttgccaatgaaccaagatacttataatagtcctaagaggggaattttcagtcttttcttactactcaaaagggggttttttatgaatacgatcttcaaacaaaagaatacacatcctttctcaaacgcagcgaatcgtttagaccgccttccgatttcacgcgttcatttccaagtgttaaccgctctcggcattgtttatttctttgatctcgcagatttatttaccctcagcaatgtagcgccggcactgatcgagcattggggcatcccgctttcaactattgctaacgtaacggctgcttcgtttttaggcatgtttttaggcgcttcactgggcggacggctgtccgatcgaatcggccgcaaaaaagccttaaatctatttgtctttgttttttcaatcgcatcgctatgcaatgctgcggcatgggacattccatctttaatgacattccgttttctcaccggatttggcgttgcagccgccatggtcattacgaatagctatttggcggaatttttcccttcaagtgtacgtggaaaatatatttctttttgtgccatgattggattgatcggggttccgatcaccaacattgtgtctgcctttgtcattcctcttggttcatggggatggaggctagtatttgtatggggtgccgtcggccttatttattttttctttattcgacggctggaagagtcgcctcgctggcacgaaaatcgcggggaatatgcgaaagccgatgcgatcctcaaccgaattgaggcacaggttgaaaaggagaaaggcccgcttccggcagcatcccagcctaaagtaagcgaaactgttaagcagcatgcaggttacgccggcttattgaaaggcagaaacctcaaaatcaccatcgtattatctgctgtatggatttttgaaacgtttgggttttacggatttgcctcatgggttccaagcctgttaaaaagcaatggtgtcaccatggaaaatacattgtggtataacgtattgcattccgtcggcgctccgcttggcgcactgctcggctccatgatttctgaaagatttcaaagaaaatggattttagctgcgagtgcgtttctgacggccatcgccgggctcttatatggtatgacttttattcccatcatgatcattgtctttggttttatcgtgaatatcacagaacgggtctttacctcgaacttatacgcctatacatctgaaccttatccgactgaataccgctcgtctggcagcggtttagcctatggtcttggccgtttttcaaacatttttggctcattgcttgtcggatttattgccgttcagctcggctatatcagcgtcttcttatttattgggggctgctggctcgcatgctccttgctgttaatcttcttcggtcctaatacgaatgcgaaacagatttaaaaaagtcagtgcggatctgccgcactgatctcattacaattgcttcaaaatcctcgcggggtttccgcctacaacagtattagcgggtacatccttagtgacaacagatccagaagcaatcactgcgttatcaccgattgtcactcccgggttaatcaccgcccggcctccaatccaaacttgatctccaattgtcacaggcttaccgaactccttcccggatttcctttcgatcggatcaagaggatgaccggccgtgtagatatgtacacctggcgcaatcaaacaatgacggccgatacgcacctcacacacatctaaaatgacacagtcaaaattaacaaatgtatgatctccgatatgaatgtgatagccataatcacagcggaatgtcggcaaaatcgtgacttgatccccaaccgaaccgagcagctccttcaaaagctctgtccgcactatatcatcttccggtgtttcgttatattgtctaatcagctgtctcgcatgcttgcgttctagtaatagttgttgatcttccgaattgtataattctccggctgccattttttctttttctgtcctcagcatttaagtcactccatgtcagattgtaatctcgatcaaatttccttcatcatcctcaatcacactttcatagtagccgtctcctgttgtccgcgggccgttgacgacggcaaaaccatccgccttcaaccgagcagtcagttcatccactttctcccggctcccaacggaaaaggcaatatgtgcccagcctgtcattgtttgtgagggcggatcggtcacatttccttttttcataatctccagccttgctccggaaccaaacgtaataaaataagacttaaaatcttttttctcattatgatacaaatcattcgcttcgccattaaaatacgattcataaaaagacttcattcgctctaaatcattgacccagaccgctgtatgttcaatctgcatttcttcctcctccttcgccttcaatgaagttataaggtatgaaatgcatttcagttcaagcttttttcttaaatttatgctgaattttgatatcagcgggttcatcctgcaaaaatagagaaaatgctgcgatgccgagctgctcaagattcaaatcaagcgacggaaaaccaagaacacggctgatagaagtatttccctcgcctatgatttcaacatcccaattactctttttggcaaatagatgaattccagctgccacttcatcactatttgcataaatagcagtcggaaccctcccgctcatataaaaatgttcagctgcccgctcaccatcattcatatcgttgcatccggacagcatatggcggtcttccaaccttccgcagacagctttataggccgcagctttatcagccgtgctcgggctcctatcagcttctctgacacacgtaaaagcaatattctcatgcccgcggccctttaaatagcgaaagctctctgcataagcagcttttctgtcattaaaagcacaaggaacatcaatgtctccggtatcctcacaagcgatgatcggcccatattcctgataagctaaaatgctgtcccaatgattggcgcgggaagtaatgatgagaccgtctattttcttcgttcttaacagctctaaatatttgatttcaatatcggggttataattggtggggagaagggtcgttgcatactcatactgaaaagccgccttggtgattccgttaacgattttatcaaagcagggatgatcgctataaggcagaatcacaccgaccgtatgggttttcccgcgaatgagatcgattgcggttcgatttggcgtataatccaattccttcatgacttgatgaacaagctttctcttttcttcagatacataaggatggtgattcaatacacgcgagacagtcgaaacagatacatttgccagtcttgcgatctcttttatatttgccatctctttctccttttcatataaaaaaagcagtaagtgtaaaatccttactgctatctcatcatatattgatgataagttcaacaggacaatggtcggaacccatgacgtccgctgatatgcaggcatcttcaatctgttccttaagtctttcagaaacaacaaaataatcaatccgccatccgatatttctgtcccgggcgccggcacgatacgaccaccaggaataagcgccttcaagatcaggataaacatgacggaaagaatcaacaaagccagcttctaagaaacgagtgaatgcccctctttcttgatctgaaaatccagcgttattccggttcacctttggatttttcaaatcaatctcctgatgggctacattcaaatcaccgcataaaatcactggttttttctgatccaattcaagaatataagacaataaagcctcttcccattgcatgcggtaatcaatccgctctaatccccttctggaattgggcgtataaacagtcatcacatacacgttttcaaattccagcgtaatcactctgccttcttggtcatgctcttctactccgataccgtagatgacctgcagcggttcttgcttagaaaaaacagctgtgccggaatatccttttttcactgcataattccagtacacatgatagccttcaggctggagatcaacctggccgtcctgtatcttcgtttcctgaagacatataatatctgcatcctcttctttcaaataagagaggaaatccatttttctcatcacagcccgcaggccgtttacattccatgaaatcaacttcatgtttcatcctcccccctataaaaaagagcaagaacccgaaggtccttgctctttacgcatcagcttactcaccgcttacgtatggaagtaaagccatttgacgtgcgcgtttgatcgctgcagtcaatttacgttggtatttagcgtttgttccagttacacgacgtggtaaaattttaccgcgctcagaaacaaactttttaagaagatctacatctttgtagtcgatgtgcgtgataccgttagaagtgaaataacacactttacggcgtttcgcacgaccgcctctgcgtcctcctgccattgtcatttccctcctttctttttcattttaggcgataatcacattagaatggaagatcatcatccgagatgtcaatcggtttgccgtcgttggcaaatgggtcatcattaaagctgttcccctgattgcgtctctggttgttttgatttcccccaaatggattatcattttggcctccgccaaagtactggcctccgccgctgtttccttcgttgtatccacctgaaccagaaccgccgccgtttttcggctcaagaaattgaacactttcagcttggacctctgtcacgaagacacgctgtccttgctggttttcatagtttcttgtttgtaaacggccatctacgcctgcaaggcttccttttttcaagaagtttgcaacgttttcggcttgtcttctccaagtgacacaattaatgaaatcggcctcacgttctccggactggttcgtaaatgtacgattcacagcaagagtaaacgtagcaacagccgcaccgtttggcgtataacgaagctctgggtcttttgtcagtcttccgactaatacaactcggttaagcataagaaagaccaccttttaccattatatatttcaaaattgcttattcttcttctttaacaacaatgtggcgaatgatatcgtcactgatcttagctagacggtcaaattcttgaactgccgcagcgtcagattgaacgtttacgatttggtagaaaccgtcgcggaaatcgttgatttcgtaagcaagacgacgtttaccccaatcctttgttccagtgatctccgcaccgttagaagtcagaacgttgttgaaacgctcgataactgcttttttagactcttcgtcaatgtttgggcggataatgtacataacttcgtactttctcatctgtttgcacctccttttggactaagcggcccataatgggcaaggagcaataattctattactcacaattttatattataccaaagctcttgtccctttacaactgcatcctatacattaaatcggaaatgaataacatctccgtcttggaccacatattctttcccttcaaggcggacttttcctgcctctttagctcctgccataccgccgcccgcaagaagatcctcataagcaactgtctcagcacgaatgaagccccgctcaaagtcactatgaataattcctgcacactcaggtgctttcatgccttttttgaatgtccaagctctgacttcctgttctccggctgtgaaatatgttgcgaggccgagaagagagtaagacgctttgatcagctgatcaagacctgattcttgaatgcccagctcttccaagaacatttgcttttcttcgccttcaagctcagcgatttcagattcgatttttgcacatacaacgataacttctgcgttttcgccggcagcgtactcgcgaatcttcgctacattttcattgccagatggatcagcaacttcatcttcacttacgttggccacgtacaaaataggcttcgaagtcagtaaatggagctgcttcacaagcttttgctgctcctcagtgaattctacagatcgagcaggcttttcactctcaaacgcttctttcagtttagataaaatctcaaactcaaatacagcgtctttatctttttgcttcgcaagcttgctgacgcgtgtaatccgcttttcaaccgtttccatatcagcgaggatcagctcaaggttgatcgtttcaatgtcatcaatcggatcaacctttccggaaacgtgtgtaatgttgtcatcggaaaaagcacggacaacgtggcaaatcgcgtcaacttggcgaatatgagataggaacttgttgccgagtccttctcctttagatgcgccctttacaatccctgcaatatcagtgaattcaaaagcagtcggcacagtcttcttcgggttgaccagctcagtcagcttttgcagacgatcatccggcacctctacaattcccacgttcggatcaattgtacagaacgggtagttggctgattcggcaccggcctgtgtaattgcgttaaatagtgttgattttccgacgttcggcaaaccaacaattccagctgttaaagccattctttcatctcctctatataaaaccgtcattgtatgaacgtattttgaacctagagcaattataaggaggttcactggaaaagacaagctgacaaaaaagcattttcagcctgccaatccctttgattatgcttttttcaagcctactaaacagtcaaaaagcgtacttcccattccattatcagaatttgtatcatttgtcagtgcattgactgaccctccaaaagccgcccacatgccttcatctatattaatcgtcttcgcatgagcctgcttcatcactttcaccttgcccttcaagcgtccgcggtcattaaagataacaacttcgtctccattctgaagatcctgctcagccgctatatctggagaaatatcgacctgaacgtgctgaagcttttcaataaacggcacatgctgtgaatggttggaacgctgcggatgaatggataacagcgtataagggtacttttcagctaactcctcattatggaaaacagattcttcgggcacatttaattgaagcgagccgctaaatcctttttgctcagctagcgacgaagtaaattcaaattttccactcggcgtcaaaaactgataatcatcccacggcacctgttttactggaagagggaggtggcctttttcttttaaacgctcaagtgtcacatcctctgcttccaatgaagaaagccccatctctaaaaattcttgagtgctgtattcaaacagctcgccaaatccaaggcgttttgcaagctctgaccagatccagctgtccgacttcgcttcaccctgcggctccacaagcttcttcccgtactgaacataatgatgatacatactggaatagtagatatcttcttcttcaaaaacagtggcagtcggcaaaacataatcacacagctttgcggtatctgtcataatggaatcaatcgcaaccgtcatgggaaccttttcaaaagcttgtctcaccttatttgtattcggcacctgagtcagcggatttccgcacgtcacaataatcatctcaatcgcaggatcagcagcggtcaacacttcttcagcctgcgtcatcattgaaaaagaacgtgatgttgtttttaattccggcaacgtcagctttgtttttgcaaagctctcgccaatctggacatttccgaaattcgcgccgccgcccttaattccgacatttccgcttgccgcaacgagtgcatcaatccaacgaatcgttcccccgccgtttttatatcgctgcatgccaagccccataaaagtagacaccggaccatcagcatacaaaccggccagatactccagctcctccatagaagtttctgttttcacaataaactcttccagagaaacagttttcaaaagctctttcacatcatcaaaaccgacagaatgctcagaaataaacgtttcatccgttcttcccgtctcaatcagaaccttcaaaacggctgccgcaagccagccgtccattccaggctttacagagatatagcggtcagcaagcttagcagtcgggttgaagatcggatcaatcaccgtaatcgtggcgcccttctttttcacctgctgcaagtgatggtataagtgcatatttgttctggatacatttcttccccacacaacaacatgcttgctgttgtaaatatcaagcgggccgtgaccgtacgaacggccaaaatcccagctttgcgcctcgatgccggagccccagcatatgcttccgacgatttcagtcacgcctccatatccattaaaaaaacgctgatcaagcgcttttaacagaccgttattcgcataatcatggctgtgcaaaacagcagtcgtctccgacgtttccttgatttcccgaagtttatcggcaatttcatcaagtgcctgctcccaagaaatccgcacaaactcgccattttgttttttcattggatagcgaagccgatcaggcgaatttgtttttgtctcaagcattctgccgcggccgcagattttaccttccgtaatcggatggtttggatctccgtccacttttgttacctttccatcaacaacagtcaccaaaaagccgcagctgtcccaacaattcagcggacatgccgactgatgcactttgctcatcgccgtcttctccttaccttctatatgaaaaagcatgagtgtcggcctatttatgaagtaggctcctcatgcttgactagtactttttttagttttctttcaaattctcttctcggaatcataacactgtgagagcatccctcacacttaattcgaatatccattcccatgcgtataattttccagctgttcgctccgcatggatgcggttttttcatttctacgatatcattcaggccaaagtctttatccgccaagacccttcacctcttttcctaaactgctgtatctattgtacaaaaaaactgatcataagagcaatcaagatacccgaaaagaaatacatcctcttatttccatttactcaaaataggatataagagcagacaaactaacaaatacaaattgagcatcccatatatcggatacaagaacgcgatcaaatcagaaaatccgaaagaagtaaaaggcaccattaacactaacaaaatcaacacaatcacccatctcggcatatgaataaacgccatcagccggctggacagccccagcaaaccagctaccgtcgtcgtgtaaatcgccaggcacagcaccgccgtcatacataaaaaaaggaaataaggcgcaccctccagaacggcaaacagcggtatttcaaactgagaaagggagcccgccagctccaccaacgtttcattataaacaaatgagatcacgccaaaaataagaccgcttgccacacttgcgatttttgcttctccgagccctttcatctctttcccaacagaggataaaatcgcaacaactgaaaggatgtttaaagaggtaaacgtaatgctcgcaggccagttatactgctgggacaaatcaatcgtccacgtatggtgatgtgtgctctgaaaggagatcagcgcatataaaagccccgctactaacacaggaatcaaaatactatttatagataatattcctttcacatcccacaaaaacaaacacactgtcacgatgcaaatcagcgtgattccccaccagaaaggaagcttgtacatttgcagggtcacaccgcctccggcaatcatcaccatagtcgtcgaaaacaaataaaaaatgatgaggacatcataaattttcgccagccatggccccattaaatgctccagaaccggcagaaaatgagtggattgaactttaaaactgattttcatcacaatataagacgagaaaatgaacatgattgtaaacagcacaatagcaagtccgctttccgccccaaaaaactgccatatctcctgaccgctcgcataaccggccccgatcaggctccctaatatgagcagcatccacttcattccggctctccacaacactatcacctcatagacaaagttcagcttgtttccgttattgttactatataaataaaagaaagcaaacatgccatattttcatagacatttaaatacaaggtgaaattatcatacgaaatacacataaaaaaagactgctaatggaggcagtctaaaaatatatcatcttgcagtggaatgaaggaatgaacctcattaaccattcctatctataaagtgttttgtaagcaaaccgtagcttgatcatgatcgaggcaatgggggacaatatttataattcacccactaaccattcataataacctctacttttttaaaatctccggtgtcatacacaaagcataaaaaaccgtactgctggatatactgtaaacaaccttacataacgaaacacacaccatagcaattctgttacctactataacaaggaagtgaaacctatgaatcgaaaaggcgggcttttttcctctcaggaacgagtaaaacaatatgtttcacatacagatgcagctgcagcaaaacaaatccaaaccattctttcttcatccttacgtaaagctgccggcaaaccaattgttgtggtttgtatcggaacagaccgttcaaccggtgattcattgggcccactcgtaggaatgaaactcaaacagatgcagctcaccagattccatgtctacggaaccttatctgaccccgtccatgctgtgaacatgaaggataaaatcaatgacattcataaattacataaaaacccatttgttatagcggtcgatgcatgcttaggccgcgttaagagtgtgggttcatttcaaatcggggacgggccattaaagcccggagccggtgtacaaaaagaccttcctgaagtgggagatcttcatattaacggaatcgtgaatgttagcggtttcatggaatattttgtattgcaaaatacaagactcaacttggtcatgaatatggccaatgttctcgcggaaggattgagtttaacagatcggacagagtggaggcaagaacgccttaacccgttgcaaaggctcactgggcgcatataaaacaaaaaccatcttcgcttgaaagatggtttcttcatttacgattctcgttcagataaaagctctaaaatccggtcaaggtcttcattagagaaaaattcaatttcgattttgccttttttcttctgtcttttaatattaactgttgttccaaaataattttggaggtaggattcccgttcttttagaaccgcatctttcacaggttcttttttctttgtttcacgtggaacattctgattcaactgctgaatcagctgctcaagctggcgaacattgagctgctccgcaatcactttttgtaccagcggttcaagcttatttttgttttttaagccaagaagcgtgcgtccatgtcccatagaaagcgtaccttcggcaataagctgctgaatattttctggcagtgtcagcagtcttaaatgattcgcaatatgcggtctgcttttcccaagacgtttggcaagctgctcttgtgtgagatctaagtgtttcaacaaggaatcatatgcctgagcctcttcaagcggagataaatcttcacgctgaaggttttctaataaagcaatttccctcattaacgcctctgataattcacggacaatggccggaactgtatctaaacctgccagctttgccgctcgaaaacgccgttcacccgcaacaatatcatagccttttaaagattttctgacgataagcggctgaagaatgccatgctgcaacacagattcttttagttcagctaatgcctcgtcatcaaagtgttttcttggctgataaggattagggcgtaaatcggcaattttaatttcttcaactgtctcttcagacaaatctacctgattaaataacgcattaatcccttttccaaggcctttagccattcgcagccacttcctttgctaaatctaaatatacttccgcacctcttgaccgcggatcgtataaaatgatgggttttccgtgactcggtgcctcactcagacggacattacgcggaataactgtcttatatactttatccctaaaatactttttaacctcttcaatcacttgaatgccaaggtttgtccgggcatcaagcattgtcagcaatacaccttcaatcattaaatcagtattcaaatgcttttgcacaaggcgtactgtatttaataactggctgagaccctccaaggcataatattcgcactgtacaggaatcacaacggaatccgaggcagtaagggcattaatcgtcagcaagcccaatgacggcggacaatcaatgataatataatcataattttgctttactgcttcaagcgctctcttcaatctcacttctcttgatattgtaggaaccagctcgatctcagcccctgcaagctgaatcgtcgcaggaatcacatccaagttctctactgtcgttgctttaataatatctattacatctgcatcatctactaaaatatcgtacacacactgctctacatcggctttttcaatccctaatccgcttgtcgcatttccctgcggatcaatatctaccagcagaacccttttccctatgtaagccaaacatgccccaaggttgacagacgtcgttgttttgccgaccccgcctttttggttcgtaattgctatgatttttcccacgatgtcacctactttcacatgaacatgtactatcttgcttctattctatcaaaaaaagattaaagcgtttcatttttttcatcattttgttccgaatcagaagggaaataattgaaaattcaagcacgctttatgctttctcttataaattctgcaatttctatgtttttttgacttaaaaaaggaatttcttaaagaaaaaaagaagaagtcacggtacagaacgtggaaacaggatggtgagaaaatgatttatcaaacgaagagagatgtacccgttacgctgatgattgtgtttctcatattactgatacaagcagatgctattgttccttttgtgctgggaaatatgagagtttccggctggatcatttttattctgctgactcttttaaatggactcatcatttggagctttattgacctaaaatatgtattgaaggaacaccatctgatcattaaagccggattgatcaaacatcaaattccttatgaaaacatcgataaagtcgttcaaaaaaagaaactgtggtccggttttcgtctgatcggctctcgccatgccatcacaatatattatcaggggggatggggacatgcagtgatttcaccgcaaaaatctgaagaatttatccccaagctcaaagaaaagaattctaatataataatattcactaaaagtaagtgattaccttttatttaaaatataaaaagctctcctgcttttcaggagagcttctattttggtatgcgaatcgttaattgaatatattcttcaaattcttcttcttccgtattcaattttacaccgctgtcttccaccattgatagtgactggcgaatcgtgttcatcgcaattcttgtatctctgctgaatgctttgcgtctcggctttggctttctcttgccttgctccagcattttcaccacgcggtcttccgtctgctttacatttaaacttttctcaataatctctgtgagcagtgtgacttggagctcaggctgtttcagcggaatcagtgctctggcatggcgctcggtgattttcttctccataattgcctcttggaccggctgaggcagctttaataaccgaagcttattcgcgattgtagactgcccttttcctaagcgctgtgcgagtgcctcctgtgttaaatcatgcagctcaagtagcctagcataagcatgcgcttcctcaatagaagacagttcttcccgctgcaagttttcaattaacgccacagaagcggtttccgtgtcggaaaaatccttaataattgccggaatcttttcccactcaagcgattgcaccgctctccagcgtctttcacctgcaatgagttcgtattggccttcttcttctgtatgcctaacaacaatcggctgaataatgccgtgtgtatgaatggtcattgctaactctttgattttttcatctgagaaaatggtgcgtggctgaaaacggttgggaacgatagcatttaccggtatttccagaatctcttctttgtttgtatcatgttcagcaatctccggctccggttccttctcaccaagcccgaagaaacgagagaatgaatgcttcatgtacctacaccacctttaaaaactgccatttttataattctattttctcatggtttttcctgctgtacatccatcaattttgatgaaaatatgatggtattgtcatatcaggctgtctaaattacccttcaattggcgatttattaggagttcccggttttcttggatacttcttaggtgtattttttattttgcgtatcaccataatattacgatcgctttcttcaataggcagcttaaaagaatggatattctcaagttctcctccaagcgtcgtgattgcttttttgcctgcattcagttcttcttcagctgatgcggcttttaaagcaacaaataaaccgtttttcttcaccagaggcaagcaaagctcactcaaaacagataatctcgcaactgctcgcgctgtcacaatatcatagctttcacgcacgtctttccgttgcccgaacgtttcagctctgtcatggcagaatgttgtattctccaattgcaaagcctcagatagcttttctaaaaacgtgatccgtttattcagtgaatccacgattgtgacattgaggtgcggaaagcatatttttatcggcagacttggaaaacccgctcccgctccgacatcacaaatcgtgttcacctgattgaagtcgacataaaaagtagctgtaatggaatcataaaaatgctttaaatacacttcttttttctctgttattgaagtcagattgattttttcgttccattcaaccagcatgtcgtaatacagctcaaattgctccagctgacggggagaaagggagatccctttttccgccaaaccagaagtgaattcttcaatattcatgccgtcatcctttctattcggctatcttcgcaatgcgtccctgctctaaatacaccaatagaattgaaatgtccgccgggtttacaccggaaatgcgggaagcttgggcaacagacaaaggccgtacatttttcagtttttgacgcgcctcggtcgcaatccccttaattgcgtcataatcaattcgatctggaatttttttattttccatcttcttcagtttttccacttgctgaagagatttttcaatatatccttcatatttcacttggatttctacttgttctgccacgtcttgaggaactggcacttctggcggcgccagttttgtgactgtttcatagttcatttcaggacgcttcatcaagtctgtgccgcgaactccatctttcaattcgcttccgccaagagaacggatatattcttgattttccggagacggcttgataattacagaatgaagacgttttttctccgcctcgatcgccgcttttttcttctcaaaagccgcatagcgctcatcagaaatcaatccaatgcgatgtccgatttctgtcagacgcaaatcagcattgtcatggcgaagaagcaatctgtattccgcacgtgatgtcaaaagacgatatggctcattggttccttttgtcacaaggtcatcaatcagaacaccaatataggcgtcagaacggcttaaaatcacttcttcttttccaagcgcttttcgtcctgcattgattcccgccataatcccttgtcccgcagcttcttcataaccggaagttccgttaatttggcctgcagtgtaaaggtttgtgattttttttgtttcaagtgtcggccagagctgtgtcggtacgattgcatcatactcgatcgcatagccggctctcatcatttgcacgttttcaagtccaggaatcgttgcaagcattctttgctgtacgtcttctggaagacttgtagataaaccttggacatagacttcctgtgtatttctgccttccggctcaaggaagatttggtgacgcggtttatcattaaaacggacaactttgtcttcaatggatgggcagtatcttgggcccgtacctttgatcataccggaatacatcggtgaacggtgcaggttgctgtcaataatctcatgtgtctcagggcttgtatatgtcagccagcaagggagctgatctgtgatatattccactgtttcatatgagaaagcgcgaggcacatcgtcaccaggctgaatttccgttttgctgtaatcaatcgtgtcgcttttaacgcgaggcggcgtacctgttttaaaacgaacaaggtcaaaaccaagttcctccaaatgctcagaaagcttaatagaaggctgctggttatttgggccgcttgagtaagacagatcgccaagaataatacgtcctcttaaatatgtccctgtcgtcatgacaactgctttcgcacgataatgtgcaccggtttgtgtaataacgcctcggcattcgccgtcttcaacgatcagccgctccacaattccttgcagcaatgttaagtttggttctttttcaagcgtatttttcatttcgtgctgatattggaatttgtctgcttgcgcacgcaatgcacgaaccgcaggaccttttcctgtattcagcattctcatttgaatatgcgttttatcgatgtttcttcccatttctccgccgagcgcgtcaatttcgcggacgacaatcccttttgcggggccgccgacagacggattacatggcataaatgcaaccatatctaggttgatggtcaagacaagcgttttggcgccttggcgtgcagatgcgagggcagcctcaacaccggcatgcccggcgccaatcacaatcacatcgtattggcctgcttcataccccatgattctagttcctccttttattattttcctaaacagaattgtgaaaagagctgatcaattaagctttcgtggacagaatctccaatgatttcccctaaaagctcccagcatcttgtaaggtcaatttgcaccatgtcgatcgggacatcctgttcgatgccgctaagcgcatcttcaatggcgcgttttgcttgctgtaaaatagagatgtgacgtgtgttgctgacataagtcagatcaccgctttcaatggcacccgtgtagaacagtgattgaatcgcttcttccagatcattgatgccttcctcttttaaaagagatgtcgtaacaactggacgtccattggcaagctcacggacacgttcagtgtcaatcttcgcctcaaggtcagtcttattcaaaatcacgataacatccatgccctcaacggcttcaaaaagcttcacgtcttcatcagaaagctcttcactataattaagcacaagtaaaatcaggtccgcttcctttagaacctggcgagaacgttcaacaccgattcgctcaacaatatcctctgtttcacgaatacctgctgtatcaaccagacgaagcgggacgccccttacattcacgtattcctcaatcacatcccgtgtcgttccgggaatatcggttacaatggcttttgcctcatgaacgaggctgttcagaagagatgattttcctacgtttggccggccgataatgacggtagaaagaccttcacgtaagatttttccttgctcagaagtcctcagcagcgtctcaatttcctttttcacggcggttgccttttcgactaaaatctgatgcgtcatttcctctacatcatcatactccggataatcgatattcacctcaacatgggccagtgtttctaaaatctcactgcgcaaacggcgcaccaaagcagaaagacgcccttccatttgattcatagcaacgttcattgcccggtccgttttcgctctgattaagtccataaccgcttccgcctgtgaaagatcgattcggccgtttaaaaacgcacgtttcgtaaattcaccaggctctgccagtctcgctccctctcttaatgcaagctgaagcacttggttcacagtcacaattcccccgtgacagttaatctcaatgacatcttctcgtgtaaaagttctcggtgcttttaacactgataccattacttcctcaacgacacgatccgaaggtctgtctacgatatgaccataatgaatcgtatgtgattcgaccgagctgagtgttttccccttcggtcccttataaattttatctgcgatttgaatggcttctggtccgctcaaccgtacaatcgcaatcgcgccttctcccatcggtgtggaaattgccgcaattgtatccatgttgttcacctctctttacttatacttcatctatataaaaaaatttttattatgccaaaactaaaagataacatagtttggttcgaagtggaagatttgttatccacagaaatagaaattcgtcccttattactttaacttatccacatgtgaataacaattaattttatttcctgaacttcctttttatcaacaggatacacctaaaaagaaaaaacttaaacggcaaaaccttgatattactaggaaaagtagatttttcggatacaaaaaaaccgaaatccaatttttatcggacttcggttttatgctatcttttatgggaaataacgagatgacgattttcgccttcacccattgaatatgttttgatctggtggtttgcatatccagaaagagtatcgtgaataatttttctttcgctggacggcatgggctcaagctggatggattttttcgttttcaaaacctggtcagcaagcttgatggccagctggctcagtgtttcttttcttttcaaacgatagttttctgcatccaccgtcacatttttatattggcctggataacggttaagggcaagctgtgtcaaagtttcaagggcgtttaaggtttgtcctcttttcccaatcaacaatgctgccttttcacctgttatatgatatctcactgtctttttgctttcttgaacagtcacatcagacttcccggcaatggcttcggcaatcgtttgaagatataacttcgcttgctgaatcggatcaatcttttcaaccagctttacgatcgcaggctttttaccgaaaatgccgagaaaccctttgtttccctcttcaataacagtaatttctaccttatccttcgttaatcccagctcttgcaatccggactgtactgcttcatcgacatttcgccctgcagcagtcacattcctcactttttctttcctccggctttttgcggctcaggattttttttaatatcaggtcctttaatgaggaaagtttgcgcaatcataaacaagttaccaactacccaataaagagaaagagccgccgggaagttgatcgcaaatacgataatcataattggcataatccaaagcatcatcgccatttgcggattttgctgcgcattgccagccatcatcagtttttgctgaacaaatgtagcgacaccggcaacgataggaagaatatagtaaggatctttttctcctaagtcaaaccataagaagctatgctctgaaatcgcctgggttctcatgatcgcatgatagaatccaattaaaatcggcatctggatcaaaatcgggaaacatcccgccaatggattgacaccatgcttttggaataaagccattgtttcctgctgaagcttttgctgcgttttttgatcctttgagctgtatttttctttaagcttttgcatttccggctgtaaagcctgcatcgctttcgaacttctcagctgcttaatcatcagcggtaaaattaataaacgaattaaaatggtaactagaattattgaaagcccgtagttatctcccgtcaatttcgctacatacgtaatgagctcagacaatggatatactacgtacttgtcccagaaatgcggactatctgcagtgatcggctctttcacactcgagcatccagccaaaagcatgaatacgccaaccatacttaatagcaaccctattctccttttcaacaacatttcctcctataattaatctttacactcttttattgcaaagcatacttgtatgtattttagcatctttcagttttaaatggtgtctttttctgatcaaccagaaaggaagcgcttttaaaagttgtaagaaagcagtggtgatgcctactttgacgaagatttcttatataatgaagactttctgaatagatgctgcagactttttttcgtttcctcatatgtcagctggctcgccggttttctggcaataatgatgtaatccttttccttcagtctctctttctcctcaagaaaggcctgccgaatcaaacgtttgatccgatttcgcatcacagcattgccaatttttttgctgacggaaagcccgacacgcagttcatcattttcaggctgatcaagcgtatataagacaaactggcggtttgcaactgatgtcccatgtttaaacactttttgaaaatcttcatttttctttaaacgatttcgcttcttcaaatgactcactccgatactggctggcagaaacttttaaaatttattatgaacatgagatgcatctgaaccaggaagcatgccccggttcattacgcatcacatctatcttttcccataacgtgaaaaaagaccactgacattattcagtggcctaagctgataatacttttctgcctttgcggcgacggcgtgctaaaactagacgaccgttttttgaactcatacggcttctgaagccatgaactttgctgcgtttacggttattcggttggaatgttcttttcatttatgacacctccctcgaggaatagctgttaaagacagtcttacttattatatttgcgttacctattcattgtcaacttcactagtgcttttatttcttgcaaccataataggataccataccttttcaactttcgaaaccttattttttagattccttaattttacggaaaaaagacaaattcaaacaatttgcccctaaaatcacgcatgtggatatctttttcggctttttttagtatccacagaggttatcgacaacattttcacattaccaacccctgtggacaaggttttttcaacaggttgtccgctttgtggataagattgtgacaaccattgcaagctctcgtttattttggtattatatttgtgttttaactcttgattactaatcctacctttcctctttatccacaaagtgtggataagttgtggattgatttcacacagcttgtgtagaaggttgtccacaagttgtgaaatttgtcgaaaagctatttatctactatattatatgttttcaacatttaatgtgtacgaatggtaagcgccatttgctctttttttgtgttctataacagagaaagacgccattttctaagaaaaggagggacgtgccggaag
